(19) United States
(12) Patent Application Publication
(10) Pub. No.: US 2006/0216717 A1
(43) Pub. Date: Sep. 28, 2006

(54) Novel human polynucleotides and the polypeptides encoded thereby

(75) Inventors: Michael Nehls, The Woodlands, TX (US); Brian Zambrowicz, The Woodlands, TX (US); Arthur T. Sands, The Woodlands, TX (US)

Correspondence Address: LEXICON GENETICS INCORPORATED, 8800 TECHNOLOGY FOREST PLACE, THE WOODLANDS, TX, 77381-1160, US

(73) Assignee: Lexicon Genetics Incorporated

(21) Appl. No.: 11/026,159

(22) Filed: Dec. 30, 2004

Related U.S. Application Data
(63) Continuation of application No. 09/398,253, filed on Sep. 17, 1999, now abandoned.
(60) Provisional application No. 60/100,917, filed on Sep. 17, 1998.

(51) Int. Cl. C12Q 1/68; C07H 21/04; C12N 9/00; C07K 14/47

(52) U.S. Cl. 435/6; 435/69.1; 435/183; 435/320.1; 435/325; 530/350; 536/23.2

(57) ABSTRACT

Novel human polynucleotides are disclosed that correspond to human gene trapped sequences, or GTSs. The disclosed GTSs are useful for gene discovery and as markers for, inter alia, gene expression analysis, forensic analysis, and determining the genetic basis of human disease.

### 1. FIELD OF THE INVENTION

[0001] The present invention is in the field of molecular genetics. The application discloses novel nucleic acid sequences that partially define the scope of human exons that can be trapped and identified by the disclosed vectors/methods, and which are useful, inter alia, for identifying the organization of the coding regions and of the human genome.

### 2. BACKGROUND OF THE INVENTION

[0002] The Human Genome Project and privately financed ventures are currently sequencing the human genome, and the substantial completion of this milestone is expected before the year 2003. The hope is that, at the conclusion of the sequencing phase, a comprehensive representation of the human genome will be available for biomedical analysis. However, the data resulting from such efforts will largely comprise human genomic sequence of which only a fraction actually encodes expressed sequence information. Although sophisticated computer-assisted exon identification programs can be applied to such genomic sequence data, the computer predictions require verification by laboratory analysis to actually identify the coding regions of the genome. Consequently, the availability of cDNA information will significantly contribute to the value of the human genomic sequence since cDNA sequence provides a direct indication of the presence of transcribed sequences as well as the location of splice junctions. Thus, the sequencing of cDNA libraries to obtain expressed sequence tags (or ESTs) that identify exons expressed within a given tissue, cell, or cell line is currently in progress. As a consequence of these efforts, a large number of EST sequences are presently compiled in public and privately held databases. However, the present EST paradigm is inherently limited by the levels and extent of mRNA production within a given cell. A related problem is the lack of cDNA sources from specific tissue and developmental expression profiles. In addition, some genes are typically only active under certain physiological conditions or are generally expressed at levels below or near the threshold necessary for cDNA cloning and detection and are therefore not effectively represented in current cDNA libraries.

[0003] Researchers have partially addressed these issues by using phage vectors to clone genomic sequences such that internal exons are trapped (Nehls, et al., 1994, Current Biology, 4(1):983-989, and Nehls, et al., 1994, Oncogene, 9:2169-2175). However, such libraries require the random cloning of genomic DNA into a suitable cloning vector in vitro, followed by reintroduction of the cloned DNA in vivo in order to express and splice the cloned genes prior to producing the cDNA library. Additionally, such methods can only “trap” the internal exons of genes. Consequently, genes containing a single exon or a single intron are typically not trapped by traditional methods of exon trapping.

### 3. SUMMARY OF THE INVENTION

[0004] The subject invention provides numerous isolated and purified novel human cDNAs produced using gene trap technology. The novel human gene trapped sequences (GTSs) of the subject invention are disclosed as SEQ ID NOS:9-1008 in the appended Sequence Listing.

[0005] The subject invention further contemplates the use of one or more of the subject GTSs, or portions thereof, to isolate cDNAs, genomic clones, or full-length genes/polynucleotides, or homologs, heterologs, paralogs, or orthologs thereof, that are capable of hybridizing to one or more of the disclosed GTSs or their complementary sequences under stringent conditions.

[0006] The subject invention additionally contemplates methods of analyzing biopolymer (e.g., oligonucleotides, polynucleotides, oligopeptides, peptides, polypeptides, proteins, etc.) sequence information comprising the steps of loading a first biopolymer sequence into or onto an electronic data storage medium (e.g., digital or analogue versions of electronic, magnetic, or optical memory, and the like) and comparing said first sequence to at least a portion of one of the polynucleotide sequences, or amino acid sequence encoded thereby, that is first disclosed in, or otherwise unique to, SEQ ID NOS:9-1008. Typically, the polynucleotide sequences, or amino acid sequences encoded thereby, will also be present on, or loaded into or onto a form of electronic data storage medium, or transferred therefrom, concurrent with or prior to comparison with the first polynucleotide.

[0007] Another embodiment of the invention is the use of a oligonucleotide or polynucleotide sequence first disclosed in at least a portion of at least one of the GTS sequences of SEQ ID NOS:9-1008 as a hybridization probe. Of particular interest is the use of such sequences in conjunction with a solid support matrix/substrate (resins, beads, membranes, plastics, polymers, metal or metallized substrates, crystalline or polycrystalline substrates, etc.). Of particular note are spatially addressable arrays (i.e., gene chips, microtiter plates, etc.) of polynucleotides wherein at least one of the polynucleotides on the spatially addressable array comprises an oligonucleotide or polynucleotide sequence first disclosed in at least one of the GTS sequences of SEQ ID NOS:9-1008.

[0008] Similarly, one or more oligonucleotide probes based on, or otherwise incorporating, sequences first disclosed in any one of SEQ ID NOS:9-1008, can be used in methods of obtaining novel gene sequence via the polymerase chain reaction or by cycle sequencing. Similar oligonucleotide hybridization probes can also comprise sequence that is complementary to a portion of a sequence that is first disclosed in, or preferably unique to, at least one of the GTS polynucleotides in the sequence listing. The oligonucleotide probes will generally comprise between about 8 nucleotides and about 80 nucleotides, preferably between about 15 and about 40 nucleotides, and more preferably between about 20 and about 35 nucleotides.

[0009] Moreover, an oligonucleotide or polynucleotide sequence first disclosed in at least one of the GTS sequences of SEQ ID NOS:9-1008 can be incorporated into a phage display system that can be used to screen for proteins, or other ligands, that are capable of binding an amino acid sequence encoded by an oligonucleotide or polynucleotide sequence first disclosed in at least one of the GTS sequences of SEQ ID NOS:9-1008.

[0010] An additional embodiment of the present invention is a library comprising individually isolated linear DNA molecules corresponding to at least a portion of the described human GTSs which are useful for synthesizing physically contiguous sequences of overlapping GTSs by, for example, the polymerase chain reaction (PCR).

[0011] The subject invention also provides for an antisense molecule which comprises at least a portion of sequence that is first disclosed in, or preferably unique to, at least one of the GTS polynucleotides.

[0012] The subject invention also contemplates a purified polypeptide in which at least a portion of the polypeptide is encoded by, and thus first disclosed by, at least a portion of a GTS of the present invention. The invention also relates to naturally occurring polynucleotides comprising the disclosed GTSs that are expressed by promoter elements other than the promoter elements that normally express the GTSs in human cells (i.e., gene activated GTSs). Such promoter elements can be directly incorporated into the cellular genome or recombinantly engineered upstream from at least a portion of a GTS (preferably at least about 50, more preferably at least about 75, and most preferably at least about 100 to 130 base in length) of the present invention, or a complement thereof. A particularly preferred embodiment includes recombinantly engineered expression vectors that similarly have or incorporate at least a, preferably unique, portion of the disclosed GTSs or complement thereof.

### 4. DESCRIPTION OF THE SEQUENCE LISTING AND FIGURES

[0013] The Sequence Listing is a compilation of nucleotide sequences obtained by sequencing a human gene trap library that at least partially identifies the genes in the target cell genome that can be trapped by the described gene trap vectors (i.e., the repertoire of genes that are active or have not been inactivated).

[0014] FIGS. 1A-1D. FIG. 1A illustrates a retroviral vector that can be used to practice the described invention. FIG. 1B shows a schematic of how a typical cellular genomic locus is effected by the integration of the retroviral construct into intronic sequences of the cellular gene. FIG. 1C shows the chimeric transcripts produced by the gene trap event as well as the locations of the binding sites for PCR primers. FIG. 1D shows how the PCR amplified cDNAs are directionally cloned into a suitable GTS vector.

### 5. DETAILED DESCRIPTION OF THE INVENTION

[0015] The present invention is directed to novel human polynucleotide sequences obtained from cDNA libraries generated by the normalized expression of genomic exons using gene trap technology. In particular, the disclosed novel polynucleotides were generated using a modified reverse-orientation retroviral gene trap vector that was nonspecifically integrated into the target cell genome, although other polynucleotide (DNA or RNA) gene trap vectors could have been introduced to the target cells by, for example, transfection, electroporation, or retrotransposition. Preferred retroviral vectors that can be used to practice the present invention (as well as methods and recombinant tools for making and using the described GTSs) are disclosed in, inter alia, U.S. application Ser. No. 09/276,533, filed Mar. 25, 1999 which is herein incorporated by reference in its entirety.

[0016] After integration, the exogenous promoter of the sequence acquisition, or 3′ gene trap, component of the vector was used to express and splice a chimeric mRNA that was subsequently reverse transcribed, amplified, and subject to DNA sequence analysis. Unlike conventional cDNA libraries, the presently disclosed libraries are largely unaffected by the bias inherent in cDNA libraries that rely solely on endogenous mRNA expression. Additionally, by integrating a vector into the target cell genes, a chimeric mRNA is produced that allows for the specific expansion and isolation of cDNAs corresponding to the chimeric mRNAs using vector specific primers.

[0017] As used herein the term “gene trapped sequence”, or “GTS”, refers to nucleotide sequences that correspond to naturally occurring endogenously encoded human exons that have been expressed as part of a chimeric “gene trapped” mRNA. Typically, the chimeric mRNA incorporates at least a portion of sequence that has been engineered into the sequence acquisition exon of a gene trap vector which, inter alia, facilitates cDNA production by reverse transcriptase and amplification of the cDNA by PCR to produce an isolated linear DNA molecule. The disclosed GTSs do not include vector encoded sequences.

[0018] The term “GTS” not only refers to polynucleotides that are exactly complementary to naturally occurring human mRNA, but also refers to “GTS derivatives”. The term “GTS derivative” also refers to heterologs, paralogs, orthologs, and allelic variants of the specific GTSs described herein. In addition, a GTS may include the complete coding region for a naturally occurring peptide or polypeptide. A GTS may also include a complete open reading frame.

[0019] The term “GTS peptide” as used herein includes oligopeptides or polypeptides sharing biological activity and/or immunogenicity (or immunological cross-reactivity) with an amino acid sequence encoded by at least one of the disclosed GTSs or complement thereof. The terms “biological activity” (or “biological characteristics”) of a polypeptide refers to the structural or biochemical function of the polypeptide in the normal biological processes of the organism in which the polypeptide naturally occurs. Examples of such characteristics include protein structure and/or conformation, which can be determined biochemically by reaction with appropriate ligands or receptors or by suitable biological assays.

[0020] A GTS peptide may also correspond to a full-length naturally occurring peptide or polypeptide. GTS peptides can have amino acid sequences that directly correspond to naturally occurring polypeptides or amino acid sequences or can comprise minor variations. Such variations can include amino acid substitutions that are the result of the replacement of one amino acid with another amino acid having a similar structural and/or chemical properties, such as the substitution of a leucine with an isoleucine or valine, an aspartate with a glutamate, or a threonine with a serine, i.e., conservative amino acid replacements. Additional variations include minor amino acid deletions and/or insertions, typically in the range of about 1 to 6 amino acids, and can also include one or more amino acid substitutions. Guidance in determining which GTS peptide amino acid residues can be replaced or deleted without abolishing the biological activity of interest may be determined empirically, or by using computer amino acid sequence databases to identify polypeptides that are homologous to a given GTS peptide and trying to avoid amino acid substitutions in conserved regions of homology.

[0021] “Homology” refers to the similarity or the degree of similarity between a reference, or known polynucleotide and/or polypeptide and a test nucleotide sequence and/or its corresponding amino acid sequence. As used herein, “homology” is defined by sequence similarity between a reference sequence and at least a portion of the newly sequenced nucleotide. Typically, a corresponding amino acid sequence similarity should exist between the peptides encoded by such homologous sequences.

[0022] To determine whether proteins are homologous, the GTS sequence is translated into the corresponding amino acid sequence. The amino acid sequence is then compared with reference polypeptide sequences. A short string of matching amino acid sequence can constitute good evidence of homology (for example, repeating Gly-Pro-X sequence, or the presence of an RGD motif). However, typically a larger number of similar amino acids is required to label two sequences homologous. Generally, the match needs to be at least about 7 or 8 amino acids, among which perhaps one mismatch is allowed. These criteria allow good sensitivity in finding all relevant sequences while providing a threshold amount of selectivity.

[0023] After peptide homology has been found, the respective nucleotide sequences are compared. An alignment of the reference and new sequences should show at least about 60%, and preferably at least about 65%, agreement over the minimum of 21 nucleotides which correspond to the 6 matching amino acids. Generally, a low percentage of agreement is acceptable if the differences are in the “wobble” position (or third nucleotide of the triplet coding for an amino acid).

[0024] As used herein, a “mutated” polypeptide has an altered primary structure typically resulting from corresponding mutations in the nucleotide sequence encoding the protein or polypeptide. As such, the term “mutated” polypeptides can include allelic variants. Mutational changes in the primary structure of a polypeptide result from deletions, additions or substitutions. A “deletion” is defined as a change in a polypeptide sequence in which one or more internal amino acid residues are absent. An “addition” is defined as a change in a polypeptide sequence which has resulted in one or more additional internal amino acid residues as compared to the wild type. A “substitution” results from the replacement of one or more amino acid residues by other residues. A polypeptide “fragment” is a polypeptide consisting of a primary amino acid sequence which is identical to a portion of the primary sequence of the polypeptide to which the polypeptide is related.

[0025] A host cell “expresses” a gene or DNA when the gene or DNA is transcribed into RNA that may optionally be translated to produce a polypeptide.

[0026] The subject invention also includes GTSs which are incorporated into expression vectors and transformed into host cells which subsequently express the polynucleotides and/or polypeptides encoded by the GTSs.

[0027] The subject invention also includes antibodies capable of specifically binding to GTS peptides, as well as methods of detecting a GTS peptides or the corresponding protein by combining a sample for analysis with an antibody capable of specifically binding to a GTS peptide and detecting the formation of antibody complexes present in the sample.

[0028] The subject invention also includes a method of isolating a GTS peptide., or its corresponding protein comprising the step of separating the GTS peptide, or its corresponding protein, from a solution utilizing an antibody capable of specifically binding to the GTS peptide or its corresponding protein.

[0029] The subject invention also provides for markers for use in detecting diseases, biological events, cell types and tissues which comprise at least a portion of a GTS sequence.

[0030] Further, the subject invention provides polynucleotide markers useful for physical and genetic mapping of the human, and/or certain model organism, genome(s). In particular, the nucleotide sequences in the Sequence Listing provide sequence tagged sites (STS), that will be useful in completing an STS-based physical map of the human genome, a goal of the human genome project (Collins, F. and Galas, D. (1993) Science 262:43-46). Additionally, some of these sequences will identify new genes. These new genes will be useful in completing physical and genetic maps of all the genes in the human genome, another goal of the human genome project.

[0031] The exons contained in the disclosed GTSs contain open reading frames (present in one of the three reading frames in either orientation of the sequence). Typically, the gene trap strategy employed to generate the GTS sequences allows for the directional cloning and identification of the sense strand. However, it is possible that occasional sequencing errors or random reverse transcription, or PCR aberrations will mask The presence of the appropriate open reading frame. In such cases of sequencing error, it is possible to determine the corresponding GTS sequence by expressing the GTS in an appropriate expression system and determining the amino acid sequence by standard peptide mapping and sequencing techniques (Current Protocols in Molecular Biology, John Wiley & Sons, Vol. 2, Sec 16, 1989). Additionally, the actual reading frame and amino acid sequence of a given nucleotide sequence may be determined by in vitro synthesis of a portion of an oligopeptide comprising a possible amino acid sequence and preparing antibodies to the oligopeptide. If the antibodies react with cells from which the GTS of interest was derived, the reading frame is likely correct. Alternatively, codon usage analysis can be used to track and correct reading frame shifts in gene sequence data.

[0032] The correct amino acid sequence of a GTS protein is largely a function of the DNA sequence and the correct amino acid sequence can be readily determined using routine techniques. For example, by providing independent three fold sequencing coverage of the GTS library, random sequencing/RT/PCR errors can be identified and corrected by selecting the sequence represented by the majority of gene trap sequences covering a given nucleotide.

[0033] The nucleotide sequences of the Sequence Listing may contain some sequencing errors and several of the nucleotide sequences of the Sequence Listing may contain nucleotides that have not been precisely identified, typically designated by an N, rather than A, T, C, or G. Since each of the nucleotide sequences presented in the Sequence Listing is believed to uniquely identify a novel GTS, any sequencing errors or N's in the nucleotide sequences of the Sequence Listing do not present a problem in practicing the subject invention. Several methods employing standard recombinant methodology, for example, as described in Molecular Cloning: Laboratory Manual 2nd ed., Sambrook et al. (1989), Cold Spring Harbor Laboratory, Cold Spring Harbor, N.Y. (or periodic updates thereof), may be used to correct errors and complete the missing sequence information. For example, a nucleotide and/or oligonucleotide corresponding to a portion of a nucleotide sequence of GTS of interest, can be chemically or biochemically synthesized in vitro, and used as a hybridization probe to screen a cDNA library in order to identify and obtain library isolates comprising recombinant DNA sequences containing the GTS cDNA sequence of interest. The library isolate may then be independently subjected to nucleotide sequencing using one or more standard sequencing procedures so as to obtain a complete and accurate nucleotide sequence.

[0034] For the purposes of this disclosure, the term “isolated and purified polynucleotide” comprises a polynucleotide purified from a natural cell or tissue as well as polynucleotides which are complementary to the polynucleotides isolated from the natural cell or tissue. One example of an isolated or purified polynucleotide, or a substantially isolated preparation thereof, is a preparation where the polynucleotide of interest represents at least about 80 percent, preferably at least about 85 percent, and more preferably at least about 90 to 95 percent or more of the net product(s) that can be visualized on a DNA agarose gel stained with ethidium bromide.

[0035] The described GTSs were obtained from isolates of a cDNA library. Clones isolated from cDNA libraries generated by 3′ gene trapping typically contain only a portion of the mature RNA transcript that has been spliced to a vector encoded sequence acquisition exon, and therefore such clones may only encode a portion of the polypeptide of interest (however, it should be appreciated that a number of the disclosed GTSs may encode full-length ORFs). To obtain the remainder of the sequence, the GTSs can be used as hybridization probes to re-screen the same or a different cDNA library, and additional clones isolated by the re-screening can be purified and characterized using standard methods (Benton and Davis, 1977, Science, 196:180-183). Once sufficiently purified, the size of the DNA insert can be approximated by agarose gel electrophoresis and the larger clones can be analyzed to determine the exact number of bases by DNA sequencing. Frequently, the use of a library different from the one which contained the original clone is useful for this purpose, and particularly a library that has been prepared with extra care to extend cDNA synthesis to full-length, or a library that has been intentionally primed with random primers in order to “jump over” particularly difficult regions of the transcript sequence.

[0036] Missing upstream DNA sequence can also be obtained by “primer extension” of the cDNA isolate, a practice common in the art (Sambrook et al. (1989), Molecular Cloning: Laboratory Manual 2nd ed. pg 7.79-7.83, Cold Spring Harbor Laboratory, Cold Spring Harbor, N.Y.), whereby a sequence-specific oligonucleotide is used to prime reverse-transcription near the 5′-end of the cDNA clone and the resulting product is either cloned into a bacterial vector or is analyzed directly by DNA sequencing. Finally, newer methods to extend clones in either direction employ oligonucleotide-directed thermocyclic DNA amplification of the missing sequences, wherein a combination of a cDNA-specific primer and a degenerate, vector-specific, or oligo-dT-binding second oligonucleotide can be used to prime strand synthesis. In any of the above methods or other methods of detecting additional cDNA sequence, two or more resulting clones containing the partial cDNA sequence can be recombined to form a single full-length cDNA by standard cloning methods. The resulting full-length cDNA may subsequently be transferred into any of a number of appropriate expression vectors.

[0037] In many instances, the sequencing of clones resulting from independent nonspecific gene trap events will result in a natural redundancy of sequencing more than one cDNA from a particular gene. As discussed above, this feature is a built in form of error detection and correction. These independent gene trap events can also be combined using the various overlapping regions of sequence into an entire contiguous sequence (“contig”) containing the complete nucleotide sequence of the full length cDNA. Similar methodology can be used to combine one or more GTSs with one or more publicly available, or proprietary, ESTs to synthesize, electronically or chemically, a contiguous sequence.

[0038] The ABI Assembler application, part of the INHERITS DNA analysis system (Applied Biosystems, Inc., Foster City, Calif.), creates and manages sequence assembly projects by assembling data from selected sequence fragments into a larger sequence. The Assembler combines two advanced computer technologies which maximize the ability to assemble sequenced DNA fragments into Assemblages, a special grouping of data where the relationships between sequences are shown by graphic overlap, alignment and statistical views. The process is based on the Meyers-Kececioglu model of fragment assembly (INHERITS™ Assembler User's Manual, Applied Biosystems, Inc., Foster City, Calif.), and uses graph theory as the foundation of a very rigorous multiple sequence alignment program for assembling DNA sequence fragments. Additional methods of using GTSs and obtaining full length versions thereof are discussed in U.S. Pat. No. 5,817,479, herein incorporated by reference.

[0039] It will be appreciated by those skilled in the art that as a result of the degeneracy of the genetic code (see, for example, Table 4-1 at page 109 of “Molecular Cell Biology”, 1986, J. Darnell et al. eds., Scientific American Books, New York, N.Y., herein incorporated by reference) a multitude of GTS nucleotide sequences, some bearing minimal nucleotide sequence homology to the nucleotide sequence of genes naturally encoding GTS peptides, can be produced. The invention has specifically contemplated each and every possible variation of nucleotide sequence that could be made by selecting combinations based on possible codon choices. These combinations are made in accordance with the standard triplet genetic code as applied to the nucleotide sequence of naturally occurring human GTS nucleotide sequences and all such variations are to be considered as being specifically disclosed. Once the triplet codons are “translated” (which can be done electronically) into their amino acid counterparts, the amino acid sequences encoded by the GTS ORFs effectively represent a generic representation of the various nucleotide sequences that can encode the amino acid sequence (i.e., each amino acid is generic for the various nucleotide codons that correspond to that amino acid).

[0040] The presently described novel human GTSs provide unique tools for diagnostic gene expression analysis, for cross species hybridization analysis, for genetic manipulations using a variety of techniques, like, for example, antisense inhibition, gene targeting, the identification or generation of full-length cDNA, mapping exons in the human genome., identifying exon splice junctions, gene therapy, gene delivery, chromosome mapping, etc. Furthermore, the expression-based detection and isolation of the described novel polynucleotides verifies that the genes encoding these sequences have not been inactivated by, for example, the covalent modification (methylation, acetylation, glycosylation, etc.) of the target cell genome, or inhibiting the function of transcriptional control elements. The fact that the genes have not been inactivated in the target cell genome can indicate an involvement in cellular metabolism, catabolism, homeostasis, or any of a wide variety of developmental and cell differentiation processes or the regulation of physiological or endocrine functions in the body, etc. (although treating the target cell with, for example, histone deacetylators can partially compensate for such inactivation and expand the targe size of a given trapping construct). These data are especially useful when correlated with cDNA data from differentiated tissues and/or cells or cell lines in order to determine whether the absence of expression is regulated at the level of transcription or gene inactivation.

### 5.1 Polynucleotides of the Present Invention

[0041] The nucleotide sequences of the various isolated human GTSs of the present invention appear in the Sequence Listing as SEQ ID NOS:9-1008. Additional embodiments of the present invention are GTS variants, or homologs, paralogs, orthologs, etc., which include isolated polynucleotides, or complements thereof, that hybridize to one or more of the disclosed GTSs of SEQ ID NOS:9-1008 under stringent, or preferably highly stringent, conditions. By way of example and not limitation, high stringency hybridization conditions can be defined as follows: Prehybridization of filters containing DNA to be screened is carried out for 8 h to overnight at 65° C. in a buffer containing 6×SSC, 50 mM Tris-HCl (pH 7.5), 1 mM EDTA, 0.02% PVP, 0.02% Ficoll, 0.02% BSA, and 500 μg/ml denatured salmon sperm DNA. Filters are hybridized for 48 h at 65° C. in prehybridization mixture containing 100 μg/ml denatured salmon sperm DNA and 5-20×10⁶ cpm of ³²P-labeled probe (alternatively, as in all hybridizations described herein, approximately 42, 44, 46, 48, 50, 52, 54, 56, 58, 62, 64, 66, 68, 70, or about 72 degrees or more can be used). The filters are then washed in approximately 1× wash mix (10× wash mix contains 3M NaCl, 0.6M Tris base, and 0.02M EDTA, alternatively, as with all washes described herein, 2×, 3×, 4×, 5×, 6× wash mix, or more, can be used) twice for 5 minutes each at room temperature, then in 1× wash mix containing 1% SDS at 60° C. (alternatively, as in all washes described herein, approximately 42, 44, 46, 48, 50, 52, 54, 56, 58, 62, 64, 66, 68, 70, or about 72 degrees or more can be used) for about 30 min, and finally in 0.3× wash mix (alternatively, as in all final washes described herein, approximately, 0.2×, 0.4×, 0.6×, 0.8×, 1×, or any concentration between about 2× and about 6× can be used in conjunction with a suitable wash temperature) containing 0.1% SDS at 60° C. (alternatively, approximately 42, 44, 46, 48, 50, 52, 54, 56, 58, 62, 64, 66, 68, 70, or about 72 degrees or more can be used) for about 30 min. The filters are then air dried and exposed to x-ray film for autoradiography. In an alternative protocol, washing of filters is done for 37° C. for 1 h in a solution containing 2× SSC, 0.01% PVP, 0.01% Ficoll, and 0.01% BSA. This is followed by a wash in 0.1×SSC at 50° C. for 45 min before autoradiography. Another example of hybridization under highly stringent conditions is hybridization to filter-bound DNA in 0.5 M NaHPO₄, 7% sodium dodecyl sulfate (SDS), 1 mM EDTA at 65° C., and washing in 0.1×SSC/0.1% SDS at 68° C. (Ausubel F. M. et al., eds., 1989, Current Protocols in Molecular Biology, Vol. I, Green Publishing Associates, Inc., and John Wiley & sons, Inc., New York, at p. 2.10.3).

[0042] Preferably, such GTS variants will encode at least a portion or domain of a, preferably naturally occurring, protein or polypeptide that encodes a functional equivalent to a protein or polypeptide, or portion or domain thereof, encoded by the disclosed GTSs. Additional examples of GTS variants include polynucleotides, or complements thereof, that are capable of binding to the disclosed GTSs under less stringent conditions, such as moderately stringent conditions, (e.g., washing in 0.2×SSC/0.1% SDS at 42° C. (Ausubel et al., 1989, supra). Moderately stringent conditions can be additionally defined, for example, as follows: Filters containing DNA are pretreated for 6 h at 55° C. in a solution containing 6×SSC, 5× Denhart's solution, 0.5% SDS and 100 μg/ml denatured salmon sperm DNA. Hybridizations are carried out in the same solution and 5-20×10⁶ cpm ³²P-labeled probe is used. Filters are incubated in hybridization mixture for 18-20 h at 55° C. (alternatively, as in all hybridizations described herein, approximately 42, 44, 46, 48, 50, 52, 54, 56, 58, 62, 64, 66, 68, 70, or about 72 degrees or more can be used in combination with a suitable concentration of salt). The filters are then washed in approximately 1× wash mix (10× wash mix contains 3M NaCl, 0.6M Tris base, and 0.02M EDTA, alternatively, as with all washes described herein, 2×, 3×, 4×, 5×, 6× wash mix, or more, can be used) twice for 5 minutes each at room temperature, then in 1× wash mix containing 1% SDS at 60° C. (alternatively, as in all washes described herein, approximately, 42, 44, 46, 48, 50, 52, 54, 56, 58, 62, 64, 66, 68, 70, or about 72 degrees or more can be used) for about 30 min, and finally in 0.3× wash mix (alternatively, as in all final washes described herein approximately 0.2×, 0.4×, 0.6×, 0.8×, 1×, or any concentration between about 2× and about 6× can be used in conjunction with a suitable wash temperature) containing 0.1% SDS at 60° C. (alternatively, approximately 42, 44, 45, 48, 50, 52, 54, 56, 58, 62, 64, 66, 68, 70, or about 72 degrees or more can be used) for about 30 min. The filters are then air dried and exposed to x-ray film for autoradiography.

[0043] In an alternative protocol, washing of filters is done twice for 30 minutes at 60° C. in a solution containing 1×SSC and 0.1% SDS. Filters are blotted dry and exposed for autoradiography.

[0044] Other conditions of moderate stringency which may be used are well-known in the art. For example, washing of filters can be done at 37° C. for 1 h in a solution containing 2×SSC, 0.1% SDS. Another example of hybridization under moderately stringent conditions is washing in 0.2×SSC/0.1% SDS at 42° C. (Ausubel et al., 1989, supra). Such less stringent conditions may also be, for example, low stringency hybridization conditions. By way of example and not limitation, procedures using such conditions of low stringency are as follows (see also Shilo and Weinberg, 1981, Proc. Natl. Acad. Sci. USA 78:6789-6792): Filters containing DNA are pretreated for 6 h at 40° C. in a solution containing 35% formamide, 5× SSC, 50 mM Tris-HCl (pH 7.5), 5 mM EDTA, 0.1% PVP, 0.1% Ficoll, 1% BSA, and 500 μg/ml denatured salmon sperm DNA. Hybridizations are carried out in the same solution with the following modifications: 0.02% PVP, 0.02% Ficoll, 0.2% BSA, 100 μg/ml salmon sperm DNA, 10% (wt/vol) dextran sulfate, and 5-20×10⁶ cpm ³²P-labeled probe is used. Filters are incubated in hybridization mixture for 18-20 h at 40° C. (alternatively, as in all hybridizations described herein, approximately 42, 44, 46, 48, 50, 52, 54, 56, 58, 62, 64, 66, 68, 70, or about 72 degrees or more can be used). The filters are then washed in approximately 1× wash mix (10× wash mix contains 3M NaCl, 0.6M Tris base, and 0.02M EDTA, alternatively, as with all washes described herein, 2×, 3×, 4×, 5×, 6× wash mix, or more, can be used) twice for five minutes each at room temperature, then in 1× wash mix containing 1% SDS at 60° C. (alternatively, as in all washes described herein, approximately 42, 44, 46, 48, 50, 52, 54, 56, 58, 62, 64, 66, 68, 70, or about 72 degrees or more can be used) for about 30 min, and finally in 0.3× wash mix (alternatively, as in all final washes described herein, approximately, 0.2×, 0.4×, 0.6×, 0.8×, 1×, or any concentration between about 2× and about 6× can be used in conjunction with a suitable wash temperature) containing 0.1% SDS at 60° C. (alternatively, approximately 42, 44, 46, 48, 50, 52, 54, 56, 58, 62, 64, 66, 68, 70, or about 72 degrees or more can be used) for about 30 min. The filters are then air dried and exposed to x-ray film for autoradiography. In yet another alternative protocol, washing of filters is done for 1.5 h at 55° C. in a solution containing 2×SSC, 25 mM Tris-HCl (pH 7.4), 5 mM EDTA, and 0.1% SDS. The wash solution is replaced with fresh solution and incubated an additional 1.5 h at 60° C. Filters are then blotted dry and exposed for autoradiography. If necessary, filters are washed for a third time at 65-68° C. and reexposed to film. Other conditions of low stringency which may be used are well known in the art (e.g., as employed for cross-species hybridizations). Preferably, GTS variants identified or isolated using the above methods will also encode a functionally equivalent gene product (i.e., protein, polypeptide, or domain thereof, encoding or otherwise associated with a function or structure at least partially encoded by the complementary GTS).

[0045] Additional embodiments contemplated by the present invention include any polynucleotide sequence comprising a continuous stretch of nucleotide sequence originally disclosed in, or otherwise unique to, any of the GTSs of SEQ ID NOS:9-1008 that are at least 8, or at least 10, or at least 14, or at least 20, or at least 30, or at least about 40, and preferably at least about 60 consecutive nucleotides up to about several hundred bases of nucleotide sequence or an entire GTS sequence. Functional equivalents of the gene products of SEQ ID NOS:9-1008 include naturally occurring variants of SEQ ID NOS:9-1008 present in other species, and mutant variants, both naturally occurring and engineered, which retain at least some of the functional activities of the gene products of SEQ ID NOS:9-1008.

[0046] The invention also includes degenerate variants of the claimed GTS sequences, and products encoded thereby. Such variants may be 80% identical to any one of SEQ ID NOS: 9-1008, more preferably 85%, more preferably 90%, more preferably 95% and most preferably 98% identical. The degree of identity (or the degree of homology) of a polynucleotide sequence to any one of SEQ ID NOS: 9-1008 may be determined using any sequence analysis program known in the art, for example, the University of Wisconsin GCG sequence analysis package, SEQUENCHER 3.0, Gene Codes Corp., Ann Arbor, Mich. The invention further includes GTS derivatives wherein any of the disclosed GTSs, or GTS variants, is linked to another polynucleotide molecule, or a fragment thereof, wherein the link may be either directly or through other polynucleotides of any sequence and of a length of about 1,000 base pairs, or about 500 base pairs, or about 300 base pairs, or about 200 base pairs, or about 150 base pairs, or about 100 base pairs or about 50 base pairs, or less.

[0047] The invention also particularly includes polynucleotide molecules, including DNA, that hybridize to, and are therefore the complements of, the nucleotide sequences of the disclosed GTSs. Such hybridization conditions may be highly stringent or less highly stringent, as described above. In instances wherein the nucleic acid molecules are deoxyoligonucleotides (“DNA oligos”), highly stringent conditions may refer to, for example, washing in 6×SSC/0.05% sodium pyrophosphate at 37° C. (for oligos having 14-base DNA oligos), 48° C. (for 17-base DNA oligos), 55° C. (for 20-base DNA oligos), and 60° C. (for 23-base oligos). Similar conditions are contemplated for RNA oligos corresponding to a portion of the disclosed GTS sequences.

[0048] These nucleic acid molecules may encode or act as antisense molecules to polynucleotides comprising at least a portion of the sequences shown in SEQ ID NOS:9-1008 that are useful, for example, to regulate the expression of genes comprising a nucleotide sequence of any of SEQ ID NOS:9-1008, and can also be used, for example, as antisense primers in amplification reactions of gene sequences. With respect to gene regulation, such techniques can be used to regulate, for example, developmental processes by modulating the expression of genes in embryonic stem cells. Further, such sequences may be used as part of ribozyme and/or triple helix sequences that can be used to regulate gene expression. Still further, such molecules may be used as components of diagnostic methods whereby, for example, the presence of a particular allele, of a gene that contains any of the sequences of SEQ ID NOS:9-1008 may be detected. Of particular interest is the use of the disclosed GTSs to conduct analysis of single nucleotide polymorphisms (SNPs), and particularly coding region SNPs or “cSNPs”, in the human genome, or as general or individual-specific forensic markers. When so applied, a collection of GTSs is obtained from an individual, and screened against a control database of cSNPs (or other genetic markers) that have previously been associated with disease, suitability or susceptibility (or sensitivity) to specific drugs or therapies, or virtually any other human trait that correlates with a given cSNP or genetic marker, or assortment thereof. In addition to disease/diagnostic testing, the described GTSs are also useful as genetic markers for the prenatal analysis of congenital traits or defects.

[0049] In addition to the nucleotide sequences described above, full length cDNA or gene sequences that contain any of SEQ ID NOS:9-1008 present in the same species and/or homologs of any of those genes present in other species can be identified and isolated by using molecular biological techniques known in the art.

[0050] In order to clone the full length cDNA sequence from any species encoding the cDNA corresponding to the entire messenger RNA or to clone variant or heterologous forms of the molecule, labeled DNA probes made from nucleic acid fragments corresponding to any of the partial cDNA disclosed herein may be used to screen a cDNA library. For example, oligonucleotides corresponding to either the 5′ or 3′ terminus of the cDNA sequence may be used to obtain longer nucleotide sequences. Briefly, the library may be plated out to yield a maximum of about 30,000 pfu for each 150 mm plate. Approximately 40 plates may be screened. The plates are incubated at 37° C. until the plaques reach a diameter of 0.25 mm or are just beginning to make contact with one another (3-8 hours). Nylon filters are placed onto the soft top agarose and after 60 seconds, the filters are peeled off and floated on a DNA denaturing solution consisting of 0.4N sodium hydroxide. The filters are then immersed in neutralizing solution consisting of 1 M Tris HCl, pH 7.5, before being allowed to air dry. The filters are prehybridized in casein hybridization buffer containing 10% dextran sulfate, 0.5 M NaCl, 50 mM Tris HCl, pH 7.5, 0.1% sodium pyrophosphate, 1% casein, 1% SDS, and denatured salmon sperm DNA at 0.5 mg/ml for 6 hours at 60° C.. The radiolabelled probe is then denatured by heating to 95° C. for 2 minutes and then added to the prehybridization solution containing the filters. The filters are hybridized at 60° C. (alternatively, as in all hybridizations described herein, approximately 42, 44, 46, 48, 50. 52, 54, 56, 58, 62, 64, 66, 68, 70, or about 72 degrees or more can be used) for about 16 hours. The filters are then washed in approximately 1× wash mix (10× wash mix contains 3M NaCl, 0.6M Tris base, and 0.02M EDTA, alternatively, as with all washes described herein, 2×, 3×, 4×, 5×, 6× wash mix, or more, can be used) twice for 5 minutes each at room temperature, then in 1× wash mix containing 1% SDS at 60° C. (alternatively, as in all washes described herein, approximately 42, 44, 46, 48, 50. 52, 54, 56, 58, 62, 64, 66, 68, 70, or about 72 degrees or more can be used) for about 30 min, and finally in 0.3× wash mix (alternatively, as in all final washes described herein, approximately, 0.2×, 0.4×, 0.6×, 0.8×, 1×, or any concentration between about 2× and about 6× can be used in conjunction with a suitable wash temperature) containing 0.1% SDS at 60° C. (alternatively, approximately 42, 44, 46, 48, 50. 52, 54, 56, 58, 62, 64, 66, 68, 70, or about 72 degrees or more can be used) for about 30 min. The filters are then air dried and exposed to x-ray film for autoradiography. After developing, the film is aligned with the filters to select a positive plaque. If a single, isolated positive plaque cannot be obtained, the agar plug containing the plaques will be removed and placed in lambda dilution buffer containing 0.1 M NaCl, 0.01M magnesium sulfate, 0.035M Tris HCl, pH 7.5, 0.01% gelatin. The phage may then be replated and rescreened to obtain single, well isolated positive plaques. Positive plaques may be isolated and the cDNA clones sequenced using primers based on the known cDNA sequence. This step may be repeated until a full length cDNA is obtained.

[0051] It may be necessary to screen multiple cDNA libraries from different sources/tissues to obtain a full length cDNA. In the event that it is difficult to identify cDNA clones encoding the complete 5′ terminal coding region, an often encountered situation in cDNA cloning, the RACE (Rapid Amplification of cDNA Ends) technique may be used. RACE is a proven PCR-based strategy for amplifying the 5′ end of incomplete cDNAs. 5′-RACE-Ready cDNA synthesized from human fetal liver containing a unique anchor sequence is commercially available (Clontech). To obtain the 5′ end of the cDNA, PCR is carried out, for example, on 5′-RACE-Ready cDNA using the provided anchor primer and the 3′ primer. A secondary PCR reaction is then carried out using the anchored primer and a nested 3′ primer according to the manufacturer's instructions.

[0052] Once obtained, the full length cDNA sequence may be translated into amino acid sequence and examined for certain landmarks found in the amino acid sequences encoded by SEQ ID NOS:9-1008, or any structural similarities to these disclosed sequences.

[0053] The identification of homologs, heterologs, or paralogs of SEQ ID NOS:9-1008 in other, preferably related, species can be useful for developing additional animal model systems that are closely related to humans for purposes of drug discovery. Genes at other genetic loci within the genome that encode proteins which have extensive homology to one or more domains of the gene products encoded by SEQ ID NOS:9-1008 can also be identified via similar techniques. In the case of cDNA libraries, such screening techniques can identify clones derived from alternatively spliced transcripts in the same or different species.

[0054] Screening can be done using filter hybridization with duplicate filters. The labeled probe can contain at least 15-30 base pairs of the nucleotide sequence presented in SEQ ID NOS:9-1008. The hybridization washing conditions used should be of a lower stringency when the cDNA library is derived from an organism different from, or heterologous to, the type of organism from which the labeled sequence was derived. With respect to the cloning of a mammalian homolog, heterolog, ortholog, or paralog, using probes derived from any of the sequences of SEQ ID NOS:9-1008, for example, hybridization can, for example, be performed at 65° C. overnight in Church's buffer (7% SDS, 250 mM NaHPO₄, 2 mM EDTA, 1% BSA). Washes can be done with 2× SSC, 0.1% SDS at 65° C. and then at 0.1×SSC, 0.1% SDS at 65° C.

[0055] Low stringency conditions are well known to those of skill in the art, and will vary predictably depending on the specific organisms from which the library and the labeled sequences are derived. For guidance regarding such conditions see, for example. Sambrook et al., 1989, Molecular Cloning, A Laboratory Manual, Cold Springs Harbor Press, N.Y.; and Ausubel et al., 1989, Current Protocols in Molecular Biology, Green Publishing Associates and Wiley Interscience, N.Y.

[0056] Alternatively, the labeled nucleotide probe of a sequence of any of SEQ ID NOS:9-1008 may be used to screen a genomic library derived from the organism of interest, again, using appropriately stringent conditions. The identification and characterization of human genomic clones is helpful for designing diagnostic tests and clinical protocols for treating disorders in human patients that are known or suspected to be linked to disease or other developmental or cell differentiation disorders and abnormalities. For example, sequences derived from regions adjacent to the intron/exon boundaries of the human gene can be used to design primers for use in amplification assays to detect mutations within the exons, introns, splice sites (e.g., splice acceptor and/or donor sites), etc., that can be used in diagnostics.

[0057] Further, gene homologs can also be isolated from nucleic acid of the organism of interest by performing PCR using two oligonucleotide primers derived from SEQ ID NOS:9-1008 or two degenerate oligonucleotide primer pools designed on the basis of amino acid sequences within the gene products encoded by SEQ ID NOS:9-1008. The template for the reaction may be cDNA obtained by reverse transcription of mRNA prepared from, for example, human or non-human cell lines, cell types, or tissues, like, for example, ES cells from the organism of interest.

[0058] The PCR product may be subcloned or sequenced directly or subcloned and sequenced to ensure that the amplified sequences represent the sequences of the gene corresponding to the sequence of SEQ ID NOS:9-1008 of interest. The PCR fragment may then be used to isolate a full length cDNA clone by a variety of methods. For example, the amplified fragment may be labeled and used to screen a cDNA library, such as a bacteriophage cDNA library. Alternatively, the labeled fragment may be used to isolate genomic clones via the screening of a genomic library.

[0059] PCR technology may also be utilized to isolate full length cDNA sequences. For example, RNA can be isolated using standard procedures from an appropriate cellular source (i.e., one known, or suspected, to express the gene corresponding to the sequence of SEQ ID NOS:9-1008 of interest, such as, for example, ES cells). A reverse transcription reaction may be performed on the RNA using an oligonucleotide primer specific for the most 5′ end of the amplified fragment for the priming of first strand synthesis. The resulting RNA/DNA hybrid may then be “tailed” with guanines, for example, using a standard terminal transferase reaction, the hybrid may be digested with RNase H, and second strand synthesis may then be primed with a poly-C primer. Thus, cDNA sequences upstream from the amplified fragment may easily be isolated. For a review of cloning strategies which may be used, see e.g., Sambrook et al., 1989, supra. Alternatively, cDNA or genomic libraries can be screened using 5′ PCR primers that hybridize to vector sequences and 3′ PCR primers specific to the gene of interest. Typically, such primers comprise oligonucleotide “priming” sequences first disclosed in, or otherwise unique to, one of the GTSs of SEQ ID NOS:9-1008.

[0060] The sequence of a gene corresponding to any of the sequences of SEQ ID NOS:9-1008 can also be used to isolate mutant alleles of that gene. Such mutant alleles may be isolated from individuals either known or suspected to have a genotype which contributes to the disease of interest or other symptoms of developmental and cell differentiation and/or proliferation disorders and abnormalities. Mutant alleles and mutant allele products may then be utilized in the therapeutic and diagnostic programs described below. Additionally, such sequences of any of the genes corresponding to SEQ ID NOS:9-1008 can be used to detect gene regulatory (e.g., promoter or promoter/enchancer) defects which can affect development or cell differentiation.

[0061] A cDNA of a mutant gene corresponding to any of the sequences of SEQ ID NOS:9-1008 can be isolated as discussed above, or, for example, by using PCR. In this case, the first cDNA strand may be synthesized by hybridizing an oligo-dT oligonucleotide to mRNA isolated from cells derived from an individual suspected of carrying a mutant gene corresponding to any of the sequences of SEQ ID NOS:9-1008 by extending the new strand with reverse transcriptase. The second strand of the cDNA is then synthesized using an oligonucleotide that hybridizes specifically to the 5′ region of the normal gene. The amplified product can be directly sequenced or cloned into a suitable vector and subsequently subjected to DNA sequence analysis. By comparing the DNA sequence of the mutant allele to that of the normal allele, the mutation(s) responsible for the loss or alteration of function of the mutant gene product can be ascertained.

[0062] Alternatively, a genomic library can be constructed using DNA obtained from one or more individuals suspected of carrying, or known to carry, a mutant allele corresponding to any of SEQ ID NOS:9-1008. Corresponding mutant cDNA libraries can be also constructed using RNA from cell types known, or suspected, to express such mutant alleles. The corresponding normal gene, or any suitable fragment thereof, may then be labeled and used as a probe to identify the corresponding mutant allele in such libraries. Clones containing the mutant gene sequences may then be identified and analyzed by DNA sequence analysis. Additionally, a protein expression library can be constructed utilizing cDNA synthesized from, for example, RNA isolated from a cell type known, or suspected, to express a mutant allele corresponding to any of the sequences of SEQ ID NOS:9-1008 from an individual suspected of, carrying or known to carry, such a mutant allele. In this manner, gene products made by the putatively mutant cell type may be expressed and screened using standard antibody screening techniques in conjunction with antibodies raised against the corresponding normal gene product or a portion thereof, as described below in Section 5.4 (For screening techniques, see, for example, Harlow, E. and Lane, eds., 1988, “Antibodies: A Laboratory Manual”, Cold Spring Harbor Press, Cold Spring Harbor.) Additionally, screening can be accomplished by screening with labeled fusion proteins. In cases where a mutation results in an expressed gene product with altered function (e.g., as a result of a missense or a frame shift mutation), a polyclonal set of antibodies to the wild-type gene product are likely to cross-react with the mutant gene product. Library clones detected via their reaction with such labeled antibodies can be purified and subjected to sequence analysis according to methods well known to those of skill in the art.

[0063] The invention also encompasses nucleotide sequences that encode mutant isoforms of any of the amino acid sequences encoded by the GTSs of SEQ ID NOS:9-1008, peptide fragments thereof, truncated versions thereof, and fusion proteins including any of the above. Examples of such fusion proteins can include, but not limited to, an epitope tag which aids in purification or detection of the resulting fusion protein; or an enzyme, fluorescent protein, luminescent protein which can be used as a marker.

[0064] The present invention additionally encompasses (a) RNA or DNA vectors that contain any portion of SEQ ID NOS:9-1008 and/or their complements as well as any of the peptides or proteins encoded thereby; (b) DNA vectors that contain a cDNA that substantially spans the entire open reading frame corresponding to any of the sequences of SEQ ID NOS:9-1008 and/or their complements; (c) DNA expression vectors that have or contain any of the foregoing sequences, or a portion thereof, operatively associated with a (d) genetically engineered host cells that contain a cDNA that spans the entire open reading frame, or any portion thereof, corresponding to any of the sequences of SEQ ID NOS:9-1008 operatively associated with a regulatory element, generally recombinantly positioned either in vivo (such as in gene activation) or in vitro that directs the expression of the coding sequences in the host cell. As used herein, regulatory elements include, but are not limited to,inducible and non-inducible promoters, enhancers, operators and other elements known to those skilled in the art that drive and regulate expression. Such regulatory elements include, but are not limited to, the baculovirus promoter, cytomegalovirus hCMV immediate early gene promoter, the early or late promoters of SV40 adenovirus, the lac system, the trp system, the TAC system, the TRC system, the major operator and promoter regions of phage A, the control regions of fd coat protein, acid phosphatase promoters, phosphoglycerate kinase (PGK) and especially 3-phosphoglycerate kinase promoters, and yeast alpha mating factors.

[0065] An additional application of the described novel human polynucleotide sequences is their use in the molecular mutagenesis/evolution of proteins that are at least partially encoded by the described novel sequences using, for example, polynucleotide shuffling or related methodologies. Such approaches are described in U.S. Pat. Nos. 5,830,721 and 5,837,458 which are herein incorporated by reference in their entirety.

### 5.2 Proteins and Polypeptides Encloded by Polynucleotides Expressed in Modified Human Cells

[0066] Peptides and proteins encoded by the open reading frame of mRNAs corresponding to SEQ ID NOS:9-1008, polypeptides and peptide fragments, mutated, truncated or deleted forms of those peptides and proteins, fusion proteins containing any of those peptides and proteins can be prepared for a variety of uses, including, but not limited to, the generation of antibodies, as reagents in diagnostic assays, the identification of other cellular gene products involved in the regulation of development and cellular differentiation of various cell types, like, for example, ES cells, as reagents in assays for screening for compounds that can be used in the treatment of disorders affecting development and cell differentiation, and as pharmaceutical reagents useful in the treatment of disorders affecting development and cell differentiation.

[0067] The invention also encompasses proteins, peptides, and polypeptides that are functionally equivalent to those encoded by SEQ ID NOS:9-1008. Such functionally equivalent products include, but are not limited to, additions or substitutions of amino acid residues within the amino acid sequence encoded by the nucleotide sequences described above, but which result in a silent change, thus producing a functionally equivalent gene product. Amino acid substitutions can be made on the basis of similarity in polarity, charge, solubility, hydrophobicity, hydrophilicity, and/or the amphipathic nature of the residues involved. For example, nonpolar (hydrophobic) amino acids include alanine, leucine, isoleucine, valine, proline, phenylalanine, tryptophan, and methionine; polar neutral amino acids include glycine, serine, threonine, cysteine, tyrosine, asparagine, and glutamine; positively charged (basic) amino acids include arginine, lysine, and histidine; and negatively charged (acidic) amino acids include aspartic acid and glutamic acid.

[0068] While random mutations can be introduced into DNA encoding peptides and proteins of the current invention (using random mutagenesis techniques well known to those skilled in the art), and the resulting mutant peptides and proteins tested for activity, site-directed mutations of the coding sequence can be engineered (using standard site-directed mutagenesis techniques) to generate mutant peptides and proteins of the current invention having increased functionality.

[0069] For example, the amino acid sequence of peptides and proteins of the current invention can be aligned with homologs from different species. Mutant peptides and proteins can be engineered so that regions of interspecies identity are maintained, whereas the variable residues are altered, e.g., by deletion or insertion of an amino acid residue(s) or by substitution of one or more different amino acid residues. Conservative alterations at the variable positions can be engineered in order to produce a mutant form of a peptide or protein of the current invention that retains function. Non-conservative changes can be engineered at these variable positions to alter function. Alternatively, where alteration of function is desired, deletion or non-conservative alterations of the conserved regions can be engineered. One of skill in the art may easily test such mutant or deleted form of a peptide or protein of the current invention for these alterations in function using the teachings presented herein.

[0070] Other mutations to the coding sequences described above can be made to generate peptides and proteins that are better suited for expression, scale up, etc. in the host cells chosen. For example, the triplet code for each amino acid can be modified to conform more closely to the preferential codon usage of the host cell's translational machinery, or, for example, to yield a messenger RNA molecule with a longer half-life. Those skilled in the art would readily know what modifications of the nucleotide sequence would be desirable to conform the nucleotide sequence to preferential codon usage or to make the messenger RNA more stable. Such information would be obtainable, for example, through use of computer programs, through review of available research data on codon usage and messenger RNA stability, and through other means known to those of skill in the art.

[0071] Peptides corresponding to one or more domains (or a portion of a domain) of one of the proteins described above, truncated or deleted proteins, as well as fusion proteins in which the full length protein described above, a subunit peptide or truncated version is fused to an unrelated protein are also within the scope of the invention and can be designed by those of skill in the art on the basis of experimental or functional considerations. Such fusion proteins include, but are not limited to, fusions to an epitope tag; or fusions to an enzyme, fluorescent protein, or luminescent protein which provide a marker function.

[0072] While the peptides and proteins of the current invention can be chemically synthesized (e.g., see Creighton, 1983, Proteins: Structures and Molecular Principles, W. H. Freeman & Co., N.Y.), large polypeptides derived from any of the polynucleotides described above may advantageously be produced by recombinant DNA technology using techniques well known in the art for expressing genes and/or coding sequences. These methods include, for example, in vitro recombinant DNA techniques, synthetic techniques, and in vivo genetic recombination. See, for example, the techniques described in Sambrook et al., 1989, supra, and Ausubel et al., 1989, supra. Alternatively, RNA capable of encoding any of the nucleotide sequences described above may be chemically synthesized using for example, synthesizers. See, for example, the techniques described in “Oligonucleotide Synthesis”, 1984, Gait, M. J. ed., IRL Press, Oxford, which is incorporated by reference herein in its entirety.

[0073] A variety of host-expression vector systems may be utilized to express the nucleotide sequences of the invention. Where the peptide or protein to be synthesized is a soluble derivative, the peptide or polypeptide can be recovered from the culture, i.e., from the host cell in cases where the peptide or polypeptide is not secreted, and from the culture media in cases where the peptide or polypeptide is secreted by the cells. However, such engineered host cells themselves may be used in situations where it is important not only to retain the structural and functional characteristics of the expressed peptide or protein, but to assess biological activity, e.g., in drug screening assays.

[0074] The expression systems that may be used for purposes of the invention include, but are not limited to, microorganisms such as bacteria (e.g., E. coli, B. subtilis) transformed with recombinant bacteriophage DNA, plasmid DNA or cosmid DNA expression vectors containing a nucleotide sequence of the current invention; yeast (e.g., Saccharomyces, Pichia) transformed with recombinant yeast expression vectors containing a nucleotide sequence of the current invention; insect cell systems infected with recombinant virus expression vectors (e.g., baculovirus) containing a nucleotide sequence of the current invention; plant cell systems infected with recombinant virus expression vectors (e.g., cauliflower mosaic virus, CaMV; tobacco mosaic virus, TMV) or transformed with recombinant plasmid expression vectors (e.g., Ti plasmid) containing a nucleotide sequence of the current invention; or mammalian cell systems (e.g., COS, CHO, BHK, 293, 3T3, U937) harboring recombinant expression constructs containing promoters derived from the genome of mammalian cells (e.g., metallothionein promoter) or from mammalian viruses (e.g., the adenovirus late promoter; the vaccinia virus 7.5K promoter).

[0075] In bacterial systems, a number of expression vectors may be advantageously selected depending upon the use intended for the gene product being expressed. For example, when large quantities of such a protein are to be produced for the generation of pharmaceutical compositions of a protein or for raising antibodies to the protein to be expressed, for example, vectors which direct the expression of high levels of fusion protein products that are readily purified may be desirable. Such vectors include, but are not limited to, the E. coli expression vector pUR278 (Ruther et al., 1983, EMBO J. 2:1791), in which the coding sequence of the polynucleotide to be expressed may be ligated individually into the vector in frame with the lacZ coding region so that a fusion protein is produced; pIN vectors (Inouye & Inouye, 1985, Nucleic Acids Res. 13:3101-3109; Van Heeke & Schuster, 1989, J. Biol. Chem. 264:5503-5509); and the like. pGEX vectors may also be used to express foreign polypeptides as fusion proteins with glutathione S-transferase (GST). If the inserted sequence encodes a relatively small polypeptide (less than 25 kD), such fusion proteins are generally soluble and can easily be purified from lysed cells by adsorption to glutathione-agarose beads followed by elution in the presence of free glutathione. The pGEX vectors are designed to include thrombin or factor Xa protease cleavage sites so that the cloned target gene product can be released from the GST moiety. Alternatively, if the resulting fusion protein is insoluble and forms inclusion bodies in the host cell, the inclusion bodies may be purified and the recombinant protein solubilized using techniques well known to one of skill in the art.

[0076] In an insect system, Autographa californica nuclear polyhidrosis virus (AcNPV) may be used as a vector to express foreign genes. (e.g., see Smith et al., 1983, J. Virol. 46: 584; Smith, U.S. Pat. No.4,215,051). In one embodiment of the current invention, Sf9 insect cells are infected with a baculovirus vector expressing a peptide or protein of the current invention.

[0077] In mammalian host cells, a number of viral-based expression systems may be utilized. Specific embodiments (described more fully below) include the gene trap cDNA sequences of the current invention that are expressed by a CMV promoter to transiently express recombinant protein in U937 cells or in Cos-7 cells. Alternatively, retroviral vector systems well known in the art may be used to insert the recombinant expression construct into host cells, or vaccinia virus-based expression systems may be employed.

[0078] In yeast, a number of vectors containing constitutive or inducible promoters may be used. For a review, see Current Protocols in Molecular Biology, Vol. 2, 1988, Ed. Ausubel et al., Greene Publish. Assoc. & Wiley Interscience, Ch. 13; Grant et al., 1987, Expression and Secretion Vectors for Yeast, in Methods in Enzymology, Eds. Wu & Grossman, 1987, Acad. Press, N.Y., Vol. 153, pp. 516-544; Glover, 1986, DNA Cloning, Vol. II, IRL Press, Wash., D.C., Ch. 3; and Bitter, 1987, Heterologous Gene Expression in Yeast, Methods in Enzymology, Eds. Berger & Kimmel, Acad. Press, N.Y., Vol. 152, pp. 673-684; and The Molecular Biology of the Yeast Saccharomyces, 1982, Eds. Strathern et al., Cold Spring Harbor Press, Vols. I and II.

[0079] In cases where plant expression vectors are used, the expression of the coding sequence may be driven by any of a number of promoters. For example, viral promoters such as the 35S RNA and 19S RNA promoters of CaMV (Brisson et al., 1984, Nature, 310:511-514), or the coat protein promoter of TMV (Takamatsu et al., 1987, EMBO J. 6:307-311) may be used; alternatively, plant promoters such as the small subunit of RUBISCO (Coruzzi et al., 1984, EMBO J. 3:1671-1680; Broglie et al., 1984, Science 224:838-843); or heat shock promoters, e.g., soybean hsp17.5-E or hsp17.3-B (Gurley et al., 1986, Mol. Cell. Biol. 6:559-565) may be used. These constructs can be introduced into plant cells using Ti plasmids, Ri plasmids, plant virus vectors, direct DNA transformation, microinjection, electroporation, etc. For reviews of such techniques see, for example, Weissbach & Weissbach, 1988, Methods for Plant Molecular Biology, Academic Press, NY, Section VIII, pp. 421-463; and Grierson & Corey, 1988, Plant Molecular Biology, 2d Ed., Blackie, London, Ch. 7-9.

[0080] In cases where an adenovirus is used as an expression vector, the nucleotide sequence of interest may be ligated to an adenovirus transcription/translation control complex, eg., the late promoter and tripartite leader sequence. This chimeric gene may then be inserted in the adenovirus genome by in vitro or in vivo recombination. Insertion in a non-essential region of the viral genome (e.g., region E1 or E3) will result in a recombinant virus that is viable and capable of expressing the gene product of interest in infected hosts. (e.g., See Logan & Shenk, 1984, Proc. Natl. Acad. Sci. USA 81:3655-3659). Specific initiation signals may also be required for efficient translation of inserted nucleotide sequences of interest. These signals include the ATG initiation codon and adjacent sequences. In cases where an entire gene or cDNA, including its own initiation codon and adjacent sequences, is inserted into the appropriate expression vector, no additional translational control signals may be needed. However, in cases where only a portion of a coding sequence of interest is inserted, exogenous translational control signals, including, perhaps, the ATG initiation codon, must be provided. Furthermore, the initiation codon must be in phase with the reading frame of the desired coding sequence to ensure translation of the entire insert. These exogenous translational control signals and initiation codons can be of a variety of origins, both natural and synthetic. The efficiency of expression may be enhanced by the inclusion of appropriate transcription enchanter elements, transcription terminators, etc. (See Bittner et al., 1987, Methods in Enzymol. 153:516-544).

[0081] In addition, a host cell strain may be chosen which modulates the expression of the inserted sequences, or modifies and processes the gene product in the specific fashion desired. Such modifications (e.g., glycosylation) and processing (e.g., cleavage) of protein products may be important for the function of the protein. Different host cells have characteristic and specific mechanisms for the post-translational processing and modification of proteins and gene products. Appropriate cell lines or host systems can be chosen to ensure the correct modification and processing of the foreign protein expressed. To this end, eukaryotic host cells which possess the cellular machinery for proper processing of the primary transcript may be used. Such mammalian host cells include, but are not limited to, CHO, VERO, BHK, HeLa, COS, MDCK, 293, 3T3, WI38, and U937 cells.

[0082] For long-term, high-yield production of recombinant proteins, stable expression is preferred. For example, cell lines which stably express the sequences of interest described above may be engineered. Rather than using expression vectors which contain viral origins of replication, host cells can be transformed with DNA controlled by appropriate expression control elements (e.g., promoter, enchanter sequences, transcription terminators, polyadenylation sites, etc.), and a selectable marker. Following the introduction of the foreign DNA, engineered cells may be allowed to grow for 1-2 days in an enriched media, and then are switched to a selective media. The selectable marker in the recombinant plasmid confers resistance to the selection and allows cells to stably integrate the plasmid into their chromosomes and grow to form foci which in turn can be cloned and expanded into cell lines. This method may advantageously be used to engineer cell lines which express the gene product of interest. Such engineered cell lines may be particularly useful in screening and evaluation of compounds that affect the endogenous activity of the gene product of interest.

[0083] A number of selection systems may be used, including but not limited to the herpes simplex virus thymidine kinase (Wigler et al., 1977, Cell 11:223), hypoxanthine-guanine phosphoribosyltransferase (Szybalska & Szybalski, 1962, Proc. Natl. Acad. Sci. USA 48:2026), and adenine phosphoribosyltransferase (Lowy et al., 1980, Cell 22:817) genes can be employed in tk⁻, hgprt⁻ or aprt⁻ cells, respectively. Also, antimetabolite resistance can be used as the basis of selection for the following genes: dhfr, which confers resistance to methotrexate (Wigler et al., 1980, Natl. Acad. Sci. USA 77:3567; O'Hare et al., 1981, Proc. Natl. Acad. Sci. USA 78:1527); gpt, which confers resistance to mycophenolic acid (Mulligan & Berg, 1981, Proc. Natl. Acad. Sci. USA 78:2072); neo, which confers resistance to the aminoglycoside G-418 (Colberre-Garapin et al., 1981, J. Mol. Biol. 150:1); and hygro, which confers resistance to hygromycin (Santerre et al., 1984, Gene 30:147).

[0084] The gene products of interest can also be expressed in transgenic animals. Animals of any species, including, but not limited to, mice, rats, rabbits, guinea pigs, pigs, micro-pigs, goats, and non-human primates, e.g., baboons, monkeys, and chimpanzees may be used to generate transgenic animals carrying the polynucleotide of interest of the current invention.

[0085] Any technique known in the art may be used to introduce the transgene of interest into animals to produce the founder lines of transgenic animals. Such techniques include, but are not limited to pronuclear microinjection (Hoppe, P. C. and Wagner, T. E., 1989, U.S. Pat. No. 4,873,191); retrovirus mediated gene transfer into germ lines (Van der Putten et al., 1985, Proc. Natl. Acad. Sci., USA 82:6148-6152); gene targeting in embryonic stem cells (Thompson et al., 1989, Cell 56:313-321); electroporation of embryos (Lo, 1983, Mol Cell. Biol. 3:1803-1814); sperm-mediated gene transfer (Lavitrano et al., 1989, Cell 57:717-723); positive-negative selection as described in U.S. Pat. No. 5,464,764 herein incorporated by reference. For a review of such techniques, see Gordon, 1989, Transgenic Animals, Intl. Rev. Cytol. 115:171-229, which is incorporated by reference herein in its entirety.

[0086] The present invention provides for transgenic animals that carry the transgene of interest in all their cells, as well as animals which carry the transgene in some, but not all their cells, i.e., mosaic animals. The transgene may be integrated as a single transgene or in concatamers, e.g., head-to-head tandems or head-to-tail tandems. The transgene may also be selectively introduced into and activated in a particular cell type by following, for example, the teaching of Lasko et al. (Lasko, M. et al., 1992, Proc. Natl. Acad. Sci. USA 89:6232-6236). The regulatory sequences required for such a cell-type specific activation will depend upon the particular cell type of interest, and will be apparent to those of skill in the art. When it is desired that the transgene of interest be integrated into the chromosomal site of the endogenous copy of that same gene, gene targeting is preferred. Briefly, when such a technique is to be utilized, vectors containing some nucleotide sequences homologous to the endogenous gene of interest are designed for the purpose of integrating, via homologous recombination with chromosomal sequences, into and disrupting the function of the nucleotide sequence of the endogenous gene of interest. In this way, the expression of the endogenous gene may also be eliminated by inserting non-functional sequences into the endogenous gene. The transgene may also be selectively introduced into a particular cell type, thus inactivating the endogenous gene of interest in only that cell type, by following, for example, the teaching of Gu et al. (Gu et al., 1994, Science 265: 103-106). The regulatory sequences required for such a cell-type specific inactivation will depend upon the particular cell type of interest and will be apparent to those of skill in the art.

[0087] Once transgenic animals have been generated, the expression of the recombinant gene of interest may be assayed utilizing standard techniques. Initial screening may be accomplished by Southern blot analysis or PCR techniques to analyze animal tissues to assay whether integration of the transgene has taken place. The level of mRNA expression of the transgene in the tissues of the transgenic animals may also be assessed using techniques which include, but are not limited to, Northern blot analysis of cell type samples obtained from the animal, in situ hybridization analysis, and RT-PCR. Samples of gene-expressing tissue, may also be evaluated immunocytochemically using antibodies specific for the transgene product, as described below.

### 5.3 Cells that Contain a Disrupted Allele of a Gene Encoding a Polynucleotide of the Current Invention

[0088] Another aspect of the current invention are cells which contain a gene that encodes a polynucleotide of the current invention and that has been disrupted. Those of skill in the art would know how to disrupt a gene in a cell using techniques known in the art. Also, techniques useful to disrupt a gene in a cell and especially an ES cell, that may already be disrupted, as disclosed in copending U.S. patent applications Ser. Nos. 08/726,867; 08/728,963; 08/907,598; and 08/942,806, all of which are hereby incorporated herein by reference in their entirety, are within the scope of the current invention to disrupt a gene that encodes a polynucleotide of the current invention.

### 5.3.1 Identification of Cells that Express Genes Encoding Polynucleotides of the Current Invention

[0089] Host cells that contain coding sequence and/or express a biologically active gene product, or fragment thereof, encoded by a gene corresponding to a GTS present invention may be identified by at least four general approaches; (a) DNA-DNA or DNA-RNA hybridization; (b) the presence or absence of “marker” gene functions; (c) assessing the level of transcription as measured by the expression of mRNA transcripts in the host cell; and (d) detection of the gene product as measured by immunoassay, enzymatic assay, chemical assay, or by its biological activity. Prior to screening for gene expression, the host cells can first be treated in an effort to increase the level of expression of genes encoding polynucleotides of the current invention, especially in cell lines that produce low amounts of the mRNAs and/or peptides and proteins of the current invention.

[0090] In the first approach, the presence of the coding sequence for peptides and proteins of the current invention inserted in the expression vector can be detected by DNA-DNA or DNA-RNA hybridization using probes comprising nucleotide sequences that are homologous to the coding sequence for peptides and proteins of the current invention, respectively, or portions or derivatives thereof.

[0091] In the second approach, the recombinant expression vector/host system can be identified and selected based upon the presence or absence of certain “marker” gene functions (e.g. thymidine kinase activity, resistance to antibiotics, resistance to methotrexate, transformation phenotype, occlusion body formation in baculovirus, etc.). For example, if the coding sequence for the peptide or protein of the current invention is inserted within a marker gene sequence of the vector, recombinants containing the coding sequence for the peptide or protein of the current invention can be identified by the absence of the marker gene function. Alternatively, a marker gene can be placed in tandem with the sequence for the peptide or protein of the current invention under the control of the same or different promoter used to control the expression of the coding sequence for the peptide or protein of the current invention. Expression of the marker in response to induction or selection indicates expression of the coding sequence for the peptide or protein of the current invention.

[0092] In the third approach, transcriptional activity for the coding region of genes specific for peptides and proteins of the current invention can be assessed by hybridization assays. For example, RNA can be isolated and analyzed by Northern blot using a probe derived from a GTS, or any portion thereof. Alternatively, total nucleic acids of the host cell may be extracted and assayed for hybridization to such probes. Additionally, RT-PCR (using GTS specific oligos/products) may be used to detect low levels of gene expression in a sample, or in RNA isolated from a spectrum of different tissues, or PCR can be used can be used to screen a variety of cDNA libraries derived from different tissues to determine which tissues express a given GTS.

[0093] In the fourth approach, the expression of the peptides and proteins of the current invention can be assessed immunologically, for example by Western blots, immunoassays such as radioimmuno-precipitation, enzyme-linked immunoassays and the like. This can be achieved by using an antibody and a binding partner specific to a peptide or protein of the current invention.

### 5.4 Antibodies to Proteins of the Current Invention

[0094] Antibodies that specifically recognize one or more epitopes of a peptide or protein of the current invention, or epitopes of conserved variants of a peptide or protein at least partially encoded by a GTS of the present invention, or any and all peptide fragments thereof, are also encompassed by the invention. Such antibodies include, but are not limited to,polyclonal antibodies, monoclonal antibodies (mAbs), humanized or chimeric antibodies, single chain antibodies, Fab fragments, F(ab′)₂ fragments, fragments produced by a Fab expression library, anti-idiotypic (anti-Id) antibodies, and epitope-binding fragments of any of the above.

[0095] The antibodies of the invention may be used, for example, in the detection of the peptide or protein of interest of the current invention in a biological sample and may, therefore, be utilized as part of a diagnostic or prognostic technique whereby patients may be tested for abnormal amounts of these proteins. Such antibodies may also be utilized in conjunction with, for example, compound screening schemes as described, below in Section 5.6 for the evaluation of the effect of test compounds on expression and/or activity of the gene products of interest of the current invention. Additionally, such antibodies can be used in conjunction with the gene therapy and gene delivery techniques described below to, for example, evaluate the normal and/or engineered peptide- or protein-expressing cells prior to their introduction into the patient. Such antibodies may additionally be used as a method for inhibiting the abnormal activity of a peptide or protein of interest at least partially encoded by a GTS of the present invention. Thus, such antibodies may, for example, be utilized as part of treatment methods for development and cell differentiation disorders.

[0096] For the production of antibodies, various host animals may be immunized by injection with the peptide or protein of interest, a subunit peptide of such protein, a truncated polypeptide, functional equivalents of the peptide or protein, mutants of the peptide or protein, or denatured forms of the above. Such host animals may include, but are not limited to,rabbits, mice, and rats, to name but a few. Various adjuvants can be used to increase the immunological response, depending on the host species, including but not limited to Freund's (complete and incomplete), mineral gels such as aluminum hydroxide, surface active substances such as lysolecithin, pluronic polyols, polyanions, peptides, oil emulsions, keyhole limpet hemocyanin, dinitrophenol, and potentially useful human adjutants such as BCG (bacille Calmette-Guerin) and Corynebacterium parvum. Polyclonal antibodies are heterogeneous populations of antibody molecules derived from the sera of the immunized animals.

[0097] Monoclonal antibodies, which are homogeneous populations of antibodies to a particular antigen, may be obtained by any technique which provides for the production of antibody molecules by continuous cell lines in culture. These include, but are not limited to the hybridoma technique of Kohler and Milstein, (1975, Nature 256:495-497; and U.S. Pat. No.4,376,110), the human B-cell hybridoma technique (Kosbor et al., 1983, Immunology Today 4:72; Cole et al., 1983, Proc. Natl. Acad. Sci. USA 80:2026-2030), and the EBV-hybridoma technique (Cole et al., 1985, Monoclonal Antibodies And Cancer Therapy, Alan R. Liss, Inc., pp. 77-96). Such antibodies may be of any immunoglobulin class including IgG, IgM, IgE, IgA, IgD and any subclass thereof. The hybridoma producing the mAb of this invention may be cultivated in vitro or in vivo. Production of high titers of mAbs in vivo makes this the presently preferred method of production.

[0098] In addition, techniques developed for the production of “chimeric antibodies” (Morrison et al., 1984, Proc. Natl. Acad. Sci. USA, 81:6851-6855; Neuberger et al., 1984, Nature, 312:604-608; Takeda et al., 1985, Nature, 314:452-454) by splicing the genes from a mouse antibody molecule of appropriate antigen specificity together with genes from a human antibody molecule of appropriate biological activity can be used. A chimeric antibody is a molecule in which different portions are derived from different animal species, such as those having a variable region derived from a porcine mAb and a human immunoglobulin constant region.

[0099] Alternatively, techniques described for the production of single chain antibodies (U.S. Pat. No. 4,946,778; Bird, 1988, Science 242:423426 Hustn et al., 1988, Proc. Natl. Acad. Sci. USA 85:5879-5883; and Ward et al., 1989, Nature 334:544-546) can be adapted to produce single chain antibodies against gene products of interest. Single chain antibodies are formed by linking the heavy and light chain fragments of the Fv region via an amino acid bridge, resulting in a single chain polypeptide.

[0100] Antibody fragments which recognize specific epitopes may be generated by known techniques. For example, such fragments include, but are not limited to: the F(ab′)₂ fragments which can be produced by pepsin digestion of the antibody molecule and the Fab fragments which can be generated by reducing the disulfide bridges of the F(ab′)₂ fragments. Alternatively, Fab expression libraries may be constructed (Huse et al., 1989, Science, 246:1275-1281) to allow rapid and easy identification of monoclonal Fab fragments with the desired specificity.

[0101] Antibodies to peptides and proteins that are fully or at least partially encoded by the described GTSs, or fragments or truncated versions thereof, can in turn be utilized to generate anti-idiotypic antibodies that “mimic” an epitope of the peptide or protein of interest, using techniques well known to those skilled in the art. (See, e.g., Greenspan & Bona, 1993, FASEB J 7(5):437-444; and Nissinoff, 1991, J. Immunol. 147(8):2429-2438). For example antibodies that bind to a regulatory peptide or protein of interest of the current invention and competitively inhibit the binding of such peptide or protein to any of its binding partners in the cell can be used to generate anti-idiotypes that “mimic” the peptide or protein of interest and, therefore, bind and neutralize the particular binding partner of the peptide or protein of interest. Such neutralizing antibodies, anti-idiotypes, Fab fragments of such antibodies, or humanized derivatives thereof, can be used in therapeutic regimens to mimic or neutralize (depending on the antibody) the effect of a particular peptide of interest, or a binding partner of a peptide or protein of interest.

### 5.5 Diagnosis of Disorders Affecting Development and Cell Differentiation

[0102] A variety of methods can be employed for the diagnostic and prognostic evaluation of disorders involving developmental and differentiation processes, and for the identification of subjects having a predisposition to such disorders.

[0103] Such methods may, for example, utilize reagents such as the nucleotide sequences described above, and antibodies to peptides and proteins of the current invention, as described, in Section 5.4. Specifically, such reagents may be used, for example, for: (1) the detection of the presence of gene mutations, or the detection of either over- or under-expression of the respective mRNAs relative to the non-disorder state; (2) the detection of either an over- or an under-abundance of the respective gene product relative to the non-disorder state; and (3) the detection of perturbations or abnormalities in the intra- and inter-cellular processes mediated by the respective peptides or proteins of the current invention.

[0104] The methods described herein may be performed, for example, by utilizing pre-packaged diagnostic kits comprising at least one specific nucleotide sequence of the current invention or antibody reagent described herein, which may be conveniently used, e.g., in clinical settings, to diagnose patients exhibiting developmental or cell differentiation disorder abnormalities.

[0105] For the detection of mutations in any of the genes described above, any nucleated cell can be used as a starting source for genomic nucleic acid. For the detection of gene expression or gene products, any cell type or tissue in which the gene of interest is expressed, such as, for example, ES cells, may be utilized. Specific examples of cells and tissues that can be analyzed using the claimed polynucleotides include, but are not limited to, endothelial cells, epithelial cells, islets, neurons or neural tissue, mesothelial cells, osteocytes, lymphocytes, chondrocytes, hematopoietic cells, immune cells, cells of the major glands or organs (e.g., lung, heart, stomach, pancreas, kidney, skin, etc.), exocrine and/or endocrine cells, embryonic and other stem cells, fibroblasts, and culture adapted and/or transformed versions of the above. Diseases or natural processes that can also be correlated with the expression of mutant, or normal, variants of the disclosed GTSs include, but are not limited to, aging, cancer, autoimmune disease, lupus, scleroderma, Crohn's disease, multiple sclerosis, inflammatory bowel disease, immune disorders, schizophrenia, psychosis, alopecia, glandular disorders, inflammatory disorders, ataxia telangiectasia, diabetes, skin disorders such as acne, eczema, and the like, osteo and rheumatoid arthritis, high blood pressure, atherosclerosis, cardiovascular disease, pulmonary disease, degenerative diseases of the neural or skeletal systems, Alzheimer's disease, Parkinson's disease, osteoporosis, asthma, developmental disorders or abnormalities, genetic birth defects, infertility, epithelial ulcerations, and viral, parasitic, fungal, yeast, or bacterial infection.

[0106] Primary, secondary, or culture-adapted variants of cancer cells/tissues can also be analyzed using the claimed polynucleotides. Examples of such cancers include, but are not limited to, Cardiac: sarcoma (angiosarcoma, fibrosarcoma, rhabdomyosarcoma, liposarcoma), myxoma, rhabdomyoma, fibroma, lipoma and teratoma; Lung: bronchogenic carcinoma (squamous cell, undifferentiated small cell, undifferentiated large cell, adenocarcinoma), alveolar (bronchiolar) carcinoma, bronchial adenoma, sarcoma, lymphoma, chondromatous hamartoma, mesothelioma; Gastrointestinal: esophagus (squamous cell carcinoma, adenocarcinoma, leiomyosarcoma, lymphoma), stomach (carcinoma, lymphoma, leiomyosarcoma), pancreas (ductal adenocarcinoma, insulinoma, glucagonoma, gastrinoma, carcinoid tumors, vipoma), small bowel (adenocarcinoma, lymphoma, carcinoid tumors, Karposi's sarcoma, leiomyoma, hemangioma, lipoma, neurofibroma, fibroma), large bowel (adenocarcinoma, tubular adenoma, villous adenoma, hamartoma, leiomyoma); Genitourinary tract: kidney (adenocarcinoma, Wilm's tumor [nephroblastoma], lymphoma, leukemia), bladder and urethra (squamous cell carcinoma, transitional cell carcinoma, adenocarcinoma), prostate (adenocarcinoma, sarcoma), testis (seminoma, teratoma, embryonal carcinoma, teratocarcinoma, choriocarcinoma, sarcoma, interstitial cell carcinoma, fibroma, fibroadenoma, adenomatoid tumors, lipoma); Liver: hepatoma (hepatocellular carcinoma), cholangiocarcinoma, hepatoblastoma, angiosarcoma, hepatocellular adenoma, hemangioma; Bone: osteogenic sarcoma (osteosarcoma), fibrosarcoma, malignant fibrous histiocytoma, chondrosarcoma, Ewing's sarcoma, malignant lymphoma (reticulum cell sarcoma), multiple myeloma, malignant giant cell tumor, chordoma, osteochronfroma (osteocartilaginous exostoses), benign chondroma, chondroblastoma, chondromyxofibroma, osteoid osteoma and giant cell tumors; Nervous system: skull (osteoma, hemangioma, granuloma, xanthoma, osteitis deformans), meninges (meningioma, meningiosarcoma, gliomatosis), brain (astrocytoma, medulloblastoma, glioma, ependymoma, germinoma [pinealoma], glioblastoma multiforme, oligodendroglioma, schwannoma, retinoblastoma, congenital tumors), spinal cord (neurofibroma, meningioma, glioma, sarcoma), Gyncological: uterus (endometrial carcinoma), cervix (cervical carcinoma, pre-tumor cervical dysplasia), ovaries (ovarian carcinoma [serous cystadenocarcinoma, mucinous cystadenocarcinoma, endometrioid tumors, celioblastoma, clear cell carcinoma, unclassified carcinoma], granulosa-thecal cell tumors, Sertoli-Leydig cell tumors, dysgerminoma, malignant teratoma), vulva (squamous cell carcinoma, intraepithelial carcinoma, adenocarcinoma, fibrosarcoma, melanoma), vagina (clear cell carcinoma, squamous cell carcinoma, botryoid sarcoma [embryonal rhabdomyosarcoma], fallopian tubes (carcinoma); Hematologic: blood (myeloid leukemia [acute and chronic], acute lymphoblastic leukemia, chronic lymphocytic leukemia, myeloproliferative diseases, multiple myeloma, myelodysplastic syndrome), Hodgkin's disease, non-Hodgkin's lymphoma [malignant lymphoma]; Skin: malignant melanoma, basal cell carcinoma, squamous cell carcinoma, Karposi's sarcoma, moles, dysplastic nevi, lipoma. angioma, dermatofibroma, keloids, psoriasis; Breast: carcinoma and sarcoma, and Adrenal glands: neuroblastoma.

[0107] Nucleic acid-based detection techniques and peptide detection techniques that can be used to conduct the above analyses are described below.

### 5.5.1. Detection of the Genes of the Current Invention and their Respective Transcripts

[0108] Mutations within the genes of the current invention can be detected by utilizing a number of techniques. Nucleic acid from any nucleated cell can be used as the starting point for such assay techniques, and may be isolated according to standard nucleic acid preparation procedures which are well known to those of skill in the art.

[0109] DNA may be used in hybridization or amplification assays of biological samples to detect abnormalities involving gene structure, including point mutations, insertions, deletions and chromosomal rearrangements. Such assays may include, but are not limited to, Southern analyses, single stranded conformational polymorphism analyses (SSCP), and PCR analyses.

[0110] Such diagnostic methods for the detection of gene-specific mutations can involve for example, contacting and incubating nucleic acids including recombinant DNA molecules, cloned genes or degenerate variants thereof, obtained from a sample, e.g., derived from a patient sample or other appropriate cellular source, with oneor more labeled nucleic acid reagents including recombinant DNA molecules, cloned genes or degenerate variants thereof, as described above, under conditions favorable for the specific annealing of these reagents to their complementary sequences within the gene of interest of the current invention. Preferably, the lengths of these nucleic acid reagents are at least 15 to 30 nucleotides. After incubation, all non-annealed nucleic acids are removed from the nucleic acid molecule hybrid. The presence of nucleic acids which have hybridized, if any such molecules exist, is then detected. Using such a detection scheme, the nucleic acid from the cell type or tissue of interest can be immobilized, for example, to a solid support such as a membrane, or a plastic surface such as that on a microtiter plate or polystyrene beads. In this case, after incubation, non-annealed, labeled nucleic acid reagents of the type described above are easily removed. Detection of the remaining, annealed, labeled nucleic acid reagents is accomplished using standard techniques well-known to those in the art. The gene sequences to which the nucleic acid reagents have annealed can be compared to the annealing pattern expected from a normal gene sequence in order to determine whether a gene mutation is present.

[0111] Alternative diagnostic methods for the detection of gene specific nucleic acid molecules, in patient samples or other appropriate cell sources, may involve their amplification, e.g., by PCR (the experimental embodiment set forth in Mullis, K. B., 1987, U.S. Pat. No. 4,683,202), followed by the detection of the amplified molecules using techniques well known to those of skill in the art. The resulting amplified sequences can be compared to those which would be expected if the nucleic acid being amplified contained only normal copies of the respective gene in order to determine whether a gene mutation exists.

[0112] Additionally, well-known genotyping techniques can be performed to identify individuals carrying mutations in any of the genes of the current invention. Such techniques include, for example, the use of restriction fragment length polymorphisms (RFLPs), which involve sequence variations in one of the recognition sites for the specific restriction enzyme used.

[0113] Furthermore, the polynucleotide sequences of the current invention may be mapped to chromosomes and specific regions of chromosomes using well known genetic and/or chromosomal mapping techniques. These techniques include in situ hybridization, linkage analysis against known chromosomal markers, hybridization screening with libraries or flow-sorted chromosomal preparations specific to known chromosomes, and the like. The technique of fluorescent in situ hybridization of chromosome spreads has been described, for example, in Verma et al. (1988) Human Chromosomes: A Manual of Basic Techniques, Pergamon Press, New York. Fluorescent in situ hybridization of chromosomal preparations and other physical chromosome mapping techniques may be correlated with additional genetic map data. Examples of genetic map data can be found, for example, in Genetic Maps: Locus Maps of Complex Genomes Book 5: Human Maps, O'Brien, editor, Cold Spring Harbor Laboratory Press (1990). Comparisons of physical chromosomal map data may be of particular interest in detecting genetic diseases in carrier states.

[0114] The level of expression of genes can also be assayed by detecting and measuring the transcription of such genes. For example, RNA from a cell type or tissue known, or suspected to express any of the genes of the current invention can be isolated and tested utilizing hybridization or PCR techniques (e.g., northern or RT PCR) such as those described, above. Such analyses may reveal both quantitative and qualitative aspects of the expression pattern of the respective gene, including activation or inactivation of gene expression. In situ hybridization using suitable radioactive labels, enzymatic labels, or chemically tagged forms of the described polynucleotide sequences can also be used to assess expression patterns in vivo.

[0115] Additionally, an oligonucleotide or polynucleotide sequence first disclosed in at least a portion of one of the GTS sequences of SEQ ID NOS:9-1008 can be used as a hybridization probe in conjunction with a solid support matrix/substrate (resins, beads, membranes, plastics, polymers, metal or metallized substrates, crystalline or polycrystalline substrates, etc.). Of particular note are spatially addressable arrays (i.e., gene chips, microtiter plates, etc.) of oligonucleotides and polynucleotides, or corresponding oligopeptides and polypeptides, wherein at least one of the biopolymers present on the spatially addressable array comprises an oligonucleotide or polynucleotide sequence first disclosed in at least one of the GTS sequences of SEQ ID NOS:9-1008, or an amino acid sequence encoded thereby. Methods for attaching biopolymers to, or synthesizing biopolymers on, solid support matrices, and conducting binding studies thereon are disclosed in, inter alia, U.S. Pat. Nos. 5,556,752, 5,744,305, 4,631,211, 5,445,934, 5,252,743, 4,713,326, 5,424,186, and 4,689,405 the disclosures of which are herein incorporated by reference in their entirety.

[0116] Oligonucleotides corresponding to the described GTSs can be used as hybridization probes either singly or in chip format. For example, a series of such GTS oligonucleotide sequences, or the complements thereof, can be used to represent all or a portion of the described GTS sequences. The oligonucleotides, typically between about 16 to about 40 (or any whole number within the stated range) nucleotides in length, may partially overlap each other and/or the NHP sequence may be represented using oligonucleotides that do not overlap. Accordingly, the described NHP polynucleotide sequences shall typically comprise at least about two or three distinct oligonucleotide sequences of at least about 18, and preferably about 25, nucleotides in length that are first disclosed in the described Sequence Listing. Such oligonucleotide sequences may begin at any nucleotide present within a sequence in the Sequence Listing and proceed in either a sense (5′-to-3′) orientation vis-a-vis the described sequence or in an antisense orientation.

[0117] Although the presently described GTSs have been specifically described using nucleotide sequence, it should be appreciated that each of the GTSs can uniquely be described using any of a wide variety of additional structural attributes, or combinations thereof. For example, a given GTS can be described by the net composition of the nucleotides present within a given region of the GTS in conjunction with the presence of one or more specific oligonucleotide sequence(s) first disclosed in the GTS. Alternatively, a restriction map specifying the relative positions of restriction endonuclease digestion sites, or various palindromic or other specific oligonucleotide sequences can be used to structurally describe a given GTS. Such restriction maps, which are typically generated by widely available computer programs (e.g., the University of Wisconsin GCG sequence analysis package, SEQUENCHER 3.0, Gene Codes Corp., Ann Arbor, Mich., etc.), can optionally be used in conjunction with one or more discrete nucleotide sequence(s) present in the GTS that can be described by the relative position of the sequence relative to one or more additional sequence(s) or one or more restriction sites present in the GTS.

### 5.5.2 Detection of the Gene Products of the Current Invention

[0118] Antibodies directed against wild type or mutant gene products of the current invention or conserved variants or peptide fragments thereof, which are discussed above in Section 5.4 may also be used as diagnostics and prognostics for disorders affecting development and cellular differentiation, as described herein. Such diagnostic methods, may be used to detect abnormalities in the level of gene expression, or abnormalities in the structure and/or temporal, tissue, cellular, or subcellular location of the respective gene product, and may be performed in vivo or in vitro, such as, for example, on biopsy tissue.

[0119] The tissue or cell type to be analyzed will generally include those which are known, or suspected, to contain cells that express the respective gene. The protein isolation methods employed herein may, for example, be such as those described in Harlow and Lane (Harlow, E. and Lane, D., 1988, “Antibodies: A Laboratory Manual”, Cold Spring Harbor Laboratory Press, Cold Spring Harbor, N.Y.), which is incorporated herein by reference in its entirety. The isolated cells can be derived from cell culture or from a patient. The analysis of cells taken from culture may be a necessary step in the assessment of cells that could be used as part of a cell-based gene therapy technique or, alternatively, to test the effect of compounds on the expression of the respective gene.

[0120] For example, antibodies, or fragments of antibodies, such as those described above in Section 5.4 are also useful in the present invention to quantitatively or qualitatively detect the presence of gene products of the current invention or conserved variants or peptide fragments thereof. This can be accomplished, for example, by immunofluorescence techniques employing a fluorescently labeled antibody (see below, this Section) coupled with light microscopic, flow cytometric, or fluorimetric detection.

[0121] The antibodies (or fragments thereof) or fusion or conjugated proteins useful in the present invention may, additionally, be employed histologically, as in immunofluorescence, immunoelectron microscopy or non-immuno assays, for in situ detection of gene products of the current invention or conserved variants or peptide fragments thereof, or for catalytic subunit binding (in the case of labeled catalytic subunit fusion protein).

[0122] In situ detection may be accomplished by removing a histological specimen from a patient, and applying thereto a labeled antibody or fusion protein of the present invention. The antibody (or fragment) or fusion protein is preferably applied by overlaying the labeled antibody (or fragment) onto a biological sample. Through the use of such a procedure, it is possible to determine not only the presence of the gene product of the current invention, or conserved variants or peptide fragments, but also its distribution in the examined tissue. Using the present invention, those of ordinary skill will readily perceive that any of a wide variety of histological methods (such as staining procedures) can be modified in order to achieve such in situ detection.

[0123] Immunoassays and non-immunoassays for gene products of the current invention or conserved variants or peptide fragments thereof will typically comprise incubating a sample, such as a biological fluid, a tissue extract, freshly harvested cells, or lysates of cells which have been incubated in cell culture, in the presence of a detectably labeled antibody capable of identifying the respective gene products of interest or conserved variants or peptide fragments thereof, and detecting the bound antibody by any of a number of techniques well-known in the art.

[0124] The biological sample may be brought in contact with and immobilized onto a solid phase support or carrier such as nitrocellulose, or other solid support which is capable of immobilizing cells, cell particles or soluble proteins. The support may then be washed with suitable buffers followed by treatment with the detectably labeled antibody specific to the peptide or protein of interest of the current invention or with fusion protein. The solid phase support may then be washed with the buffer a second time to remove unbound antibody or fusion protein. The amount of bound label on solid support may then be detected by conventional means.

[0125] “Solid phase support or carrier” is intended to encompass any support capable of binding an antigen or an antibody. Well-known supports or carriers include glass, polystyrene, polypropylene, polyethylene, dextran, nylon, amylases, natural and modified celluloses, polyacrylamides, gabbros, and magnetite. The nature of the carrier can be either soluble to some extent or insoluble for the purposes of the present invention. The support material may have virtually any possible structural configuration so long as the coupled molecule is capable of binding to an antigen or antibody. Thus, the support configuration may be spherical, as in a bead, or cylindrical, as in the inside surface of a test tube, or the external surface of a rod. Alternatively, the surface may be flat such as a sheet, test strip, etc. Preferred supports include polystyrene beads. Those skilled in the art will know many other suitable carriers for binding antibody or antigen, or will be able to ascertain the same by use of routine experimentation.

[0126] The binding activity of a given lot of antibody or fusion protein may be determined according to well known methods. Those skilled in the art will be able to determine operative and optimal assay conditions for each determination by employing routine experimentation.

[0127] With respect to antibodies, one of the ways in which the antibody can be detectably labeled is by linking the same to an enzyme and use in an enzyme immunoassay (EIA) (Voller, “The Enzyme Linked Immunosorbent Assay (ELISA)”, 1978, Diagnostic Horizons 2:1-7, Microbiological Associates Quarterly Publication, Walkersville, Md.); Voller et al., 1978, J. Clin. Pathol. 31:507-520; Butler, 1981, Meth. Enzymol. 73:482-523; Maggio (ed.), 1980, Enzyme Immunoassay, CRC Press, Boca Raton, Fla.; Ishikawa et al., (eds.), 1981, Enzyme Immunoassay, Kgaku Shoin, Tokyo). The enzyme which is bound to the antibody will react with an appropriate substrate, preferably a chromogenic substrate, in such a manner as to produce a chemical moiety which can be detected, for example, by spectrophotometric, fluorimetric or by visual means. Enzymes which can be used to detectably label the antibody include, but are not limited to, malate dehydrogenase, staphylococcal nuclease, delta-5-steroid isomerase, yeast alcohol dehydrogenase, alpha-glycerophosphate, dehydrogenase, triose phosphate isomerase, horseradish peroxidase, alkaline phosphatase, asparaginase, glucose oxidase, beta-galactosidase, ribonuclease, urease, catalase, glucose-6-phosphate dehydrogenase, glucoamylase and acetylcholinesterase. The detection can be accomplished by colorimetric methods which employ a chromogenic substrate for the enzyme. Detection may also be accomplished by visual comparison of the extent of enzymatic reaction of a substrate in comparison with similarly prepared standards.

[0128] Detection may also be accomplished using any of a variety of other immunoassays. For example, by radioactively labeling the antibodies or antibody fragments, it is possible to detect the peptide or protein of interest through the use of a radioimmunoassay (RIA) (see, for example, Weintraub, B., Principles of Radioimmunoassays, Seventh Training Course on Radioligand Assay Techniques, The Endocrine Society, March, 1986, which is incorporated by reference herein). The radioactive isotope can be detected by such means as the use of a gamma counter or a scintillation counter or by autoradiography.

[0129] It is also possible to label the antibody with a fluorescent compound. When the fluorescently labeled antibody is exposed to light of the proper wave length, its presence can then be detected due to fluorescence. Among the most commonly used fluorescent labeling compounds are fluorescein isothiocyanate, rhodamine, phycoerythrin, phycocyanin, allophycocyanin and fluorescamine.

[0130] The antibody can also be detectably labeled using fluorescence emitting metals such as ¹⁵²Eu, or others of the lanthanide series. These metals can be attached to the antibody using such metal chelating groups as diethylenetriaminepentacetic acid (DTPA) or ethylenediaminetetraacetic acid (EDTA).

[0131] The antibody also can be detectably labeled by coupling it to a chemiluminescent compound. The presence of the chemiluminescent-tagged antibody is then determined by detecting the presence of luminescence that arises during the course of a chemical reaction. Examples of particularly useful chemiluminescent labeling compounds are luminol, isoluminol, theromatic acridinium ester, imidazole, acridinium salt and oxalate ester.

[0132] Likewise, a bioluminescent compound may be used to label the antibody of the present invention. Bioluminescence is a type of chemiluminescence found in biological systems in, which a catalytic protein increases the efficiency of the chemiluminescent reaction. The presence of a bioluminescent protein is determined by detecting the presence of luminescence. Important bioluminescent compounds for labeling purposes include, but are not limited to, luciferin, luciferase and aequorin.

[0133] An additional use of a peptide or polypeptide encoded by an oligonucleotide or polynucleotide sequence first disclosed in at least one of the GTS sequences of SEQ ID NOS:9-1008 is by incorporating the sequence into a phage display, or other peptide library/binding, system that can be used to screen for proteins, or other ligands, that are capable of binding to an amino acid sequence encoded by an oligonucleotide or polynucleotide sequence first disclosed in at least one of the GTS sequences of SEQ ID NOS:9-1008 (see U.S. Pat. Nos. 5,270,170, and 5,432,018, herein incorporated by reference in their entirety). Moreover, peptide arrays comprising a novel amino acid sequence corresponding to a portion of at least one of the polynucleotide sequences first disclosed in SEQ ID NOS:9-1008 can be generated and screened essentially as described in U.S. Pat. Nos. 5,143,854, 5,405,783, and 5,252,743, the complete disclosures of which are herein incorporated by references.

[0134] Additionally, the presently described GTSs, or primers derived therefrom, can be used to screen spatially addressable arrays, or pools therefrom, of clones present in a full-length human cDNA library. The 96 well microtiter plate format is especially well-suited to the screening, by PCR for example, of pooled subfractions of cDNA clones.

### 5.6 Screening Assays for Compounds that Modulate the Expression or Activity of Peptides and Proteins of the Current Invention

[0135] The following assays are designed to identify compounds that interact with (e.g. bind to) peptides and proteins at least partially encoded by one of SEQ ID NOS:9-1008 (i.e. peptides or proteins of the current invention) compounds that interact with (e.g., bind to) intracellular proteins that interact with peptides and proteins of the current invention, compounds that interfere with the interaction of peptides and proteins of the current invention with each other and with other intracellular proteins involved in developmental and cell differentiation processes, and to compounds which modulate the activity of genes of the current invention (i.e., modulate the level of expression of genes of the current invention) or modulate the level of gene products of the current invention. Assays may additionally be utilized which identify compounds which bind to gene regulatory sequences (e.g., promoter sequences) and which may modulate the expression of genes of the current invention. See e.g., Platt, K. A., 1994, J. Biol. Chem. 269:28558-28562, which is incorporated herein by reference in its entirety.

[0136] Compounds that can be screened in accordance with the invention include, but are not limited to, peptides, antibodies and fragments thereof, prostaglandins, lipids and other organic compounds (e.g., terpines, peptidomimetics) that bind to the peptide or protein of interest of the current invention and either mimic the activity triggered by the natural ligand (i.e., agonists) or inhibit the activity triggered by the natural ligand (i.e., antagonists); as well as peptides, antibodies or fragments thereof, and other organic compounds that mimic the peptide or protein of interest of the current invention (or a portion thereof) and bind to and “neutralize” natural ligand.

[0137] Such compounds may include, but are not limited to, peptides such as, for example, soluble peptides, including but not limited to members of random peptide libraries (see, e.g., Lam, K. S. et al., 1991, Nature 354:82-84; Houghten, R. et al., 1991, Nature 354:84-86), and combinatorial chemistry-derived molecular library peptides made of D- and/or L-configuration amino acids, phosphopeptides (including, but not limited to, members of random or partially degenerate, directed phosphopeptide libraries; see, e.g., Songyang. Z. et al., 1993, Cell 72:767-778); antibodies (including, but not limited to, polyclonal, monoclonal, humanized, anti-idiotypic, chimeric or single chain antibodies, and Fab, F(ab′)₂ and Fab expression library fragments, and epitope-binding fragments thereof); and small organic or inorganic molecules.

[0138] Other compounds that can be screened in accordance with the invention include, but are not limited to, small organic molecules that are able to gain entry into an appropriate cell (e.g., in ES cells) and affect the expression of a gene of the current invention or some other gene involved in development and cell differentiation (e.g., by interacting with the regulatory region or transcription factors involved in gene expression); or such compounds that affect the activity of the peptide or protein of interest of the current invention, e.g., by inhibiting or enhancing the binding of such peptide or protein to another cellular peptide or protein, or other factor, necessary for catalysis, signal transduction, or the like, that is involved in developmental or cell differentiation processes.

[0139] Computer modeling and searching technologies permit the identification of compounds, or the improvement of already identified compounds, that can modulate the expression or activity of peptides or proteins of interest of the current invention. Having identified such a compound or composition, the active sites or regions are identified. Such active sites might typically be the binding partner sites, such as, for example, the interaction domains of the peptides and proteins of the current invention with their respective binding partners. The active site can be identified using methods known in the art including, for example, from study of the amino acid sequences of peptides, from the nucleotide sequences of nucleic acids, or from study of complexes of the relevant compound or composition with its natural ligand. In the latter case, chemical or X-ray crystallographic methods can be used to find the active site by finding where on the factor the complexed ligand is found.

[0140] Next, the three dimensional geometric structure of the active site is determined. This can be done by known methods, including X-ray crystallography, which can determine a complete molecular structure. On the other hand, solid or liquid phase NMR can be used to determine certain intra-molecular distances. Any other experimental method of structure determination can be used to obtain partial or complete geometric structures. The geometric structures may be measured with a complexed ligand, natural or artificial, which may increase the accuracy of the active site structure determined.

[0141] If an incomplete or insufficiently accurate structure is determined, the methods of computer based numerical modeling can be used to complete the structure or improve its accuracy. Any recognized modeling method may be used, including parameterized models specific to particular biopolymers such as proteins or nucleic acids, molecular dynamics models based on computing molecular motions, statistical mechanics models based on thermal ensembles, or combined models. For most types of models, standard molecular force fields, representing the forces between constituent atoms and groups, are necessary, and can be selected from force fields known in physical chemistry. The incomplete or less accurate experimental structures can serve as constraints on the complete and more accurate structures computed by these modeling methods.

[0142] Finally, having determined the structure of the active site, either experimentally, by modeling, or by a combination, candidate modulating compounds can be identified by searching databases containing compounds along with information on their molecular structure. Such a search seeks compounds having structures that match the determined active site structure and that interact with the groups defining the active site. Such a search can be manual, but is preferably computer assisted. These compounds found from this search are potential modulating compounds of the peptides and proteins of interest of the current invention.

[0143] Alternatively, these methods can be used to identify improved modulating compounds from an already known modulating compound or ligand. The composition of the known compound can be modified and the structural effects of modification can be determined using the experimental and computer modeling methods described above applied to the new composition. The altered structure is then compared to the active site structure of the compound to determine if an improved fit or interaction results. In this manner, systematic variations in composition, such as by varying side groups, can be quickly evaluated to obtain modified modulating compounds or ligands of improved specificity or activity.

[0144] Further experimental and computer modeling methods useful to identify modulating compounds based upon identification of the active sites of peptides and proteins of interest of the current invention, and related factors involved in development, cellular differentiation, and other cellular processes will be apparent to those of skill in the art.

[0145] Examples of molecular modeling systems are the CHARM and QUANTA programs (Polygon Corporation, Waltham, Mass.). CHARM performs the energy minimization and molecular dynamics functions. QUANTA performs the construction, graphic modeling and analysis of molecular structure. QUANTA allows interactive construction, modification, visualization, and analysis of the behavior of molecules with each other.

[0146] A number of articles review computer modeling of drugs interactive with specific proteins, such as Rotivinen et al., 1988, Acta Pharmaceutical Fennica 97:159-166; Ripka, New Scientist 54-57 (Jun. 16, 1988); McKinaly and Rossmann, 1989, Annu. Rev. Pharmacol. Toxicol. 29:111-122; Perry and Davies, OSAR: Quantitative Structure-Activity Relationships in Drug Design pp. 189-193 (Alan R. Liss, Inc. 1989); Lewis and Dean, 1989, Proc. R. Soc. Lond. 236:125-140 and 141-162; and, with respect to a model receptor for nucleic acid components, Askew et al., 1989, J. Am. Chem. Soc. 111: 1082-1090. Other computer programs that screen and graphically depict chemicals are available from companies such as BioDesign, Inc. (Pasadena, Calif.), Allelix, Inc. (Mississauga, Ontario, Canada), and Hypercube, Inc. (Cambridge, Ontario). Although these are primarily designed for application to drugs specific to particular proteins, they can be adapted to the design of drugs specific to regions of DNA or RNA, once that region is identified.

[0147] Although described above with reference to design and generation of compounds which could alter binding, one could also screen libraries of known compounds, including natural products or synthetic chemicals, and biologically active materials, including proteins, for compounds which are inhibitors or activators.

[0148] Compounds identified via assays such as those described herein may be useful, for example, in elaborating the biological function of the gene products of interest of the current invention and for ameliorating disorders affecting development and cell differentiation. Assays for testing the effectiveness of compounds, identified by, for example, techniques such as those described below.

### 5.6.1. In Vitro Screening Assays for Compounds that Bind to Peptides and Proteins of the Current Invention

[0149] In vitro systems may be designed to identify compounds capable of interacting with (e.g., binding to) peptides and proteins of interest of the current invention, fragments thereof, and variants thereof. The identified compounds can be useful, for example, in modulating the activity of wild type and/or mutant gene products of the current invention; may be utilized in screens for identifying compounds that disrupt normal interactions of the peptides and proteins of the current invention with other factors, like, for example, other peptides and proteins; or may in themselves disrupt such interactions.

[0150] The principle of the assays used to identify compounds that bind to the peptides and proteins of the current invention involves preparing a reaction mixture of the peptides and proteins of interest that are disclosed by the current invention and a test compound under conditions and for a time sufficient to allow the two components to interact and bind, thus forming a complex that can be removed from and/or detected in the reaction mixture. The peptides and proteins of the current invention used can vary depending upon the goal of the screening assay. For example, where agonists of the natural ligand are sought, the full length peptide or protein of interest, or a fusion protein containing the subunit of interest fused to a protein or polypeptide that affords advantages in the assay system (e.g., labeling, isolation of the resulting complex, etc.) can be utilized.

[0151] The screening assays can be conducted in a variety of ways. For example, one method of conducting such an assay involves anchoring the peptide or protein of interest, or a fragment or fusion protein thereof, or the test substance onto a solid phase and detecting peptide or protein of interest/test compound complexes anchored on the solid phase at the end of the reaction. In one embodiment of such a method, the peptide or protein of interest may be anchored onto a solid surface, and the test compound, which is not anchored, may be labeled, either directly or indirectly. In another embodiment of the method, a peptide or protein of interest of the current invention anchored on the solid phase is complexed with a natural ligand of such peptide or protein of interest. Then, a test compound could be assayed for its ability to disrupt the association of the complex.

[0152] In practice, microtiter plates may conveniently be utilized as the solid phase. The anchored component may be immobilized by non-covalent or covalent attachments. Non-covalent attachment may be accomplished by simply coating the solid surface with a solution of the protein and drying. Alternatively, an immobilized antibody, preferably a monoclonal antibody, specific for the peptide or protein to be immobilized may be used to anchor the peptide or protein to the solid surface. The surfaces may be prepared in advance and stored.

[0153] In order to conduct the assay, the nonimmobilized component is added to the coated surface containing the anchored component. After the reaction is complete, unreacted components are removed (e.g., by washing) under conditions such that any complexes formed will remain immobilized on the solid surface. The detection of complexes anchored on the solid surface can be accomplished in a number of ways. Where the previously nonimmobilized component is pre-labeled, the detection of label immobilized on the surface indicates that complexes were formed. Where the previously nonimmobilized component is not pre-labeled, an indirect label can be used to detect complexes anchored on the surface; e.g., using a labeled antibody specific for the previously nonimmobilized component (the antibody, in turn, may be directly labeled or indirectly labeled with a labeled anti-Ig antibody).

[0154] Alternatively, a reaction can be conducted in a liquid phase, the reaction products separated from unreacted components, and complexes detected; e.g., using an immobilized antibody specific for one component of complexes formed, like, for example, the peptide or protein of interest of the current invention or the test compound to anchor any complexes formed in solution, and a labeled antibody specific for the other component of the possible complex to detect anchored complexes.

### 5.6.2 Assays for Intracullular Proteins that Interact with the Peptides and Proteins of the Current Invention

[0155] Any method suitable for detecting protein-protein interactions may be employed for identifying intracellular peptides and proteins that interact with peptides and proteins of the current invention. Among the traditional methods which may be employed are co-immunoprecipitation, crosslinking and co-purification through gradients or chromatographic columns of cell lysates or proteins obtained from cell lysates and the peptides and proteins of the current invention to identify proteins in the lysate that interact with those peptides and proteins of the current invention. For these assays, the peptides and proteins of the current invention may be used in full length, or in truncated or modified forms or as fusion-proteins. Similarly, the component may be a complex of two or more of the peptides and proteins of the current invention. Once isolated, such an intracellular protein can be identified and can, in turn, be used in conjunction with standard techniques to identify proteins with which it interacts. For example, at least a portion of the amino acid sequence of an intracellular protein which interacts with a peptide or protein of the current invention, can be ascertained using techniques well known to those of skill in the art, such as via the Edman degradation technique. (See, e.g., Creighton, 1983, “Proteins: Structures and Molecular Principles”, W. H. Freeman & Co., N.Y., pp.34-49). The amino acid sequence obtained may be used as a guide for the generation of oligonucleotide mixtures that can be used to screen for gene sequences encoding such intracellular proteins. Screening may be accomplished, for example, by standard hybridization or PCR techniques. Techniques for the generation of oligonucleotide mixtures and the screening are well-known. (See, e.g., Ausubel, supra., and PCR Protocols: A Guide to Methods and Applications, 1990, Innis, M. et al., eds. Academic Press, Inc., New York).

[0156] Additionally, methods may be employed which result in the simultaneous identification of genes which encode the intracellular proteins interacting with peptides and proteins of the current invention. These methods include, for example, probing expression libraries, in a manner similar to the well known technique of antibody probing of egt11 libraries, using a labeled form of a peptide or protein of the current invention, or a fusion protein, e.g., a peptide or protein at least partially encoded by a GTS of the present invention fused to a marker (e.g., an enzyme, fluor, luminescent protein, or dye), or an Ig-Fc domain.

[0157] One method that detects protein interactions in vivo, the two-hybrid system, is described in detail for illustration only and not by way of limitation. One version of this system has been described (Chien et al., 1991, Proc. Natl. Acad. Sci. USA, 88:9578-9582) and is commercially available from Clontech (Palo Alto, Calif.).

[0158] Briefly, utilizing such a system, plasmids are constructed that encode two hybrid proteins: one plasmid consists of nucleotides encoding the DNA-binding domain of a transcription activator protein fused to a nucleotide sequence of the current invention encoding a peptide or protein of the current invention, a modified or truncated form or a fusion protein, and the other plasmid consists of nucleotides encoding the transcription activator protein's activation domain fused to a cDNA encoding an unknown protein which has been recombined into this plasmid as part of a cDNA library. The DNA-binding domain fusion plasmid and the cDNA library are transformed into a strain of the yeast Saccharomyces cerevisiae that contains a reporter gene (e.g., HBS or lacZ) whose regulatory region contains the transcription activator's binding site. Either hybrid protein alone cannot activate transcription of the reporter gene; the DNA-binding domain hybrid cannot because it does not provide activation function, and the activation domain hybrid cannot because it cannot localize to the activator's binding sites. Interaction of the two hybrid proteins reconstitutes the functional activator protein and results in expression of the reporter gene, which is detected by an assay for the reporter gene product.

[0159] The two-hybrid system or related methodology may be used to screen activation domain libraries for proteins that interact with the “bait” gene product. By way of example, and not by way of limitation, a peptide or protein of the current invention may be used as the bait gene product. Total genomic or cDNA sequences are fused to the DNA encoding an activation domain. This library and a plasmid encoding a hybrid of a bait gene product of the current invention fused to the DNA-binding domain are cotransformed into a yeast reporter strain, and the resulting transformants are screened for those that express the reporter gene. For example, and not by way of limitation, a bait gene sequence of the current invention can be cloned into a vector such that it is translationally fused to the DNA encoding the DNA-binding domain of the GAL4 protein. These colonies are purified and the library plasmids responsible for reporter gene expression are isolated. DNA sequencing is then used to identify the proteins encoded by the library plasmids.

[0160] A cDNA library of the cell line from which proteins that interact with bait gene product of the current invention are to be detected can be made using methods routinely practiced in the art. According to the particular system described herein, for example, the cDNA fragments can be inserted into a vector such that they are translationally fused to the transcriptional activation domain of GAL4. This library can be co-transfected along with the bait gene-GAL4 fusion plasmid into a yeast strain which contains a lacZ gene driven by a promoter which contains GAL4 activation sequence. A cDNA encoded protein, fused to GAL4 transcriptional activation domain, that interacts with bait gene product will reconstitute an active GAL4 protein and thereby drive expression of the HIS3 gene. Colonies which express HIS3 can be detected by their growth on petri dishes containing semi-solid agar based media lacking histidine. The cDNA can then be purified from these strains, and used to produce and isolate the bait gene-interacting protein using techniques routinely practiced in the art.

### 5.6.3 Assays for Compounds that Interfere with Interactions of the Peptides and Proteins of the Current Invention with Intracellular Macromolecules

[0161] The macromolecules that interact with the peptides and proteins of the current invention are referred to, for purposes of this discussion, as “binding partners”. These binding partners are likely to be involved in catalytic reactions or signal transduction pathways, and therefore, in the role of the peptides and proteins of the current invention in development and cell differentiation. It is also desirable to identify compounds that interfere with or disrupt the interaction of such binding partners with the peptides and proteins of the current invention which may be useful in regulating the activity of the peptides and proteins of the current invention and thus control development and cell differentiation disorders associated with the activity of the peptides and proteins of the current invention.

[0162] The basic principle of the assay systems used to identify compounds that interfere with the interaction between the peptides and proteins of the current invention and its binding partner or partners involves preparing a reaction mixture containing the peptides or proteins of the current invention of interest, modified or truncated version thereof, or fusion proteins thereof as described above, and the binding partner under conditions and for a time sufficient to allow the two to interact and bind, thus forming a complex. In order to test a compound for inhibitory activity, the reaction mixture is prepared in the presence and absence of the test compound. The test compound may be initially included in the reaction mixture, or may be added at a time subsequent to the addition of the peptide or protein of the current invention and its binding partner. Control reaction mixtures are incubated without the test compound or with a placebo. The formation of any complexes between the peptide or protein of the current invention and the binding partner is then detected. The formation of a complex in the control reaction, but not in the reaction mixture containing the test compound, indicates that the compound interferes with the interaction of the peptide or protein at least partially encoded by a GTS of the present invention and the interactive binding partner. Additionally, complex formation within reaction mixtures containing the test compound and normal peptide or protein of the current invention may also be compared to complex formation within reaction mixtures containing the test compound and a mutant peptide or protein of the current invention. This comparison can be important in those cases wherein it is desirable to identify compounds that disrupt interactions of mutant but not normal forms of a peptide or protein of the current invention.

[0163] The assay for compounds that interfere with the interaction of a peptide or protein of the current invention and binding partners can be conducted in a heterogeneous or homogeneous format. Heterogeneous assays involve anchoring either the peptide or protein of the current invention or the binding partner onto a solid phase and detecting complexes anchored on the solid phase at the end of the reaction. In homogeneous assays, the entire reaction is carried out in a liquid phase. In either approach, the order of addition of reactants can be varied to obtain different information about the compounds being tested. For example, test compounds that interfere with the interaction by competition can be identified by conducting the reaction in the presence of the test substance; i.e., by adding the test substance to the reaction mixture prior to or simultaneously with the peptide or protein of the current invention and interactive binding partner. Alternatively, test compounds that disrupt preformed complexes, e.g. compounds with higher binding constants that displace one of the components from the complex, can be tested by adding the test compound to the reaction mixture after complexes have been formed. The various formats are described briefly below.

[0164] In a heterogeneous assay system, either the peptide or protein of the current invention or the interactive binding partner, is anchored onto a solid surface, while the non-anchored species is labeled either directly or indirectly. In practice, microtiter plates are conveniently utilized. The anchored species may be immobilized by non-covalent or covalent attachments. Non-covalent attachment may be accomplished simply by coating the solid surface with a solution of the peptide or protein of the current invention or binding partner and drying. Alternatively, an immobilized antibody specific for the species to be anchored may be used to anchor the species to the solid surface. The surfaces may be prepared in advance and stored.

[0165] In order to conduct the assay, the partner of the immobilized species is exposed to the coated surface with or without the test compound. After the reaction is complete, unreacted components are removed (e.g., by washing) and any complexes formed will remain immobilized on the solid surface. The detection of complexes anchored on the solid surface can be accomplished in a number of ways. Where the non-immobilized species is pre-labeled, the detection of label immobilized on the surface indicates that complexes were formed. Where the non-immobilized species is not pre-labeled, an indirect label can be used to detect complexes anchored on the surface; e.g., using a labeled antibody specific for the initially non-immobilized species (the antibody, in turn, may be directly labeled or indirectly labeled with a labeled anti-Ig antibody). Depending upon the order of addition of reaction components, test compounds which inhibit complex formation or which disrupt preformed complexes can be detected.

[0166] Alternatively, the reaction can be conducted in a liquid phase in the presence or absence of the test compound, the reaction products separated from unreacted components, and complexes detected; e.g., using an immobilized antibody specific for one of the binding components to anchor any complexes formed in solution, and a labeled antibody specific for the other partner to detect anchored complexes. Again, depending upon the order of addition of reactants to the liquid phase, test compounds which inhibit complex or which disrupt preformed complexes can be identified.

[0167] In an alternate embodiment of the invention, a homogeneous assay can be used. In this approach, a preformed complex of the peptide or protein of the current invention and the interactive binding partner is prepared in which either the peptide or protein of the current invention or its binding partner is labeled, but the signal generated by the label is quenched due to formation of the complex (see, e.g., U.S. Pat. No. 4,109,496 by Rubenstein which utilizes this approach for immunoassays). The addition of a test substance that competes with and displaces one of the species from the preformed complex will result in the generation of a signal above background. In this way, test substances which disrupt peptide or protein of the current invention/intracellular binding partner interaction can be identified.

[0168] In a particular embodiment, a peptide or protein of the current invention can be prepared for immobilization. For example, the peptide or protein of the current invention or a fragment thereof can be fused to a glutathione-S-transferase (GST) gene using a fusion vector, such as pGEX-5X-1, in such a manner that its binding activity is maintained in the resulting fusion protein. The interactive binding partner can be purified and used to raise a monoclonal antibody, using methods routinely practiced in the art and described above. This antibody can be labeled with the radioactive isotope ¹²⁵I, for example, by methods routinely practiced in the art. In a heterogeneous assay, e.g., the GST-peptide or protein of the current invention fusion protein can be anchored to glutathione-agarose beads. The interactive binding partner can then be added in the presence or absence of the test compound in a manner that allows interaction and binding to occur. At the end of the reaction period, unbound material can be washed away, and the labeled monoclonal antibody can be added to the system and allowed to bind to the complexed components. The interaction between the peptide or protein of the current invention and the interactive binding partner can be detected by measuring the amount of radioactivity that remains associated with the glutathione-agarose beads. A successful inhibition of the interaction by the test compound will result in a decrease in measured radioactivity.

[0169] Alternatively, the GST-peptide or protein of the current invention fusion protein and the interactive binding partner can be mixed together in liquid in the absence of the solid glutathione-agarose beads. The test compound can be added either during or after the species are allowed to interact. This mixture can then be added to the glutathione-agarose beads and unbound material is washed away. Again the extent of inhibition of the peptide or protein of the current invention/binding partner interaction can be detected by adding the labeled antibody and measuring the radioactivity associated with the beads.

[0170] In another embodiment of the invention, these same techniques can be employed using peptide fragments that correspond to the binding domains of a peptide or protein of the current invention and/or the interactive or binding partner (in cases where the binding partner is a protein) in place of one or both of the full length proteins. Any number of methods routinely practiced in the art can be used to identify and isolate the binding sites. These methods include, but are not limited to, mutagenesis of the gene encoding one of the proteins and screening for disruption of binding in a co-immunoprecipitation assay. Compensating mutations in the gene encoding the second species in the complex can then be selected. Sequence analysis of the genes encoding the respective proteins will reveal the mutations that correspond to the region of the protein involved in interactive binding. Alternatively, one protein can be anchored to a solid surface using methods described above, and allowed to interact with and bind to its labeled binding partner, which has been treated with a proteolytic enzyme, such as trypsin. After washing, a short, labeled peptide comprising the binding domain may remain associated with the solid material, which can be isolated and identified by amino acid sequencing. Also, once the gene coding for the intracellular binding partner is obtained, short gene segments can be engineered to express peptide fragments of the protein, which can then be tested for binding activity and purified or synthesized.

[0171] For example, and not by way of limitation, a peptide or protein of the current invention can be anchored to a solid material as described, above, by making a GST-peptide or protein of the current invention fusion protein and allowing it to bind to glutathione agarose beads. The interactive binding partner can be labeled with a radioactive isotope, such as ³⁵S, and cleaved with a proteolytic enzyme such as trypsin. Cleavage products can then be added to the anchored GST-peptide or protein of the current invention fusion protein and allowed to bind. After washing away unbound peptides, labeled bound material, representing the intracellular binding partner binding domain, can be eluted, purified, and analyzed for amino acid sequence by well-known methods. Peptides so identified can be produced synthetically or fused to appropriate facilitative proteins using recombinant DNA technology.

### 5.6.4 Assays for Identification of Compounds that Ameliorate Disorders Affecting Development and Cell Differentiation

[0172] Compounds including, but not limited to, binding compounds identified via assay techniques such as those described above, can be tested for the ability to ameliorate development and cell differentiation disorder symptoms. The assays described above can identify compounds which affect the activity of peptides and proteins of the current invention (e.g., compounds that bind to the peptides and proteins of the current invention, inhibit binding of their natural ligands, and compounds that bind to a natural ligand of the peptides and proteins of the current invention and neutralize the ligand activity); or compounds that affect the activity of genes encoding peptides and proteins of the current invention (by affecting the expression of those genes, including molecules, e.g., proteins or small organic molecules, that affect or interfere with splicing events so that expression of the genes of interest can be modulated). However, it should be noted that the assays described herein can also identify compounds that modulate signal transduction or catalytic events that the peptides and proteins of the current invention are involved in. The identification and use of such compounds which affect a step in, for example, signal transduction pathways or catalytic events in which any of the peptides and proteins of the current invention are involved in, may modulate the effect of the peptides and proteins of the current invention on developmental or cell differentiation disorders. Such identification and use of such compounds are within the scope of the invention. Such compounds can be used as part of a therapeutic method for the treatment of developmental and cell differentiation disorders.

[0173] The invention encompasses cell-based and animal model-based assays for the identification of compounds exhibiting such an ability to ameliorate developmental and cell differentiation disorder symptoms. Such cell-based assay systems can also be used as the standard to assay for purity and potency of the natural ligand, catalytic subunit, including recombinantly or synthetically produced catalytic subunit and catalytic subunit mutants.

[0174] Cell-based systems can be used to identify compounds which may act to ameliorate developmental or cell differentiation disorder symptoms. Such cell systems can include, for example, recombinant or non-recombinant cells, such as cell lines, which express the gene encoding the peptide or protein of interest of the current invention. For example ES cells, or cell lines derived from ES cells can be used. In addition, expression host cells (e.g., COS cells, CHO cells, fibroblasts, Sf9 cells) genetically engineered to express a functional peptide or protein of the current invention in addition to factors necessary for the peptide or protein of the current invention to fulfil its physiological role of, for example, signal transduction or catalyses, can be used as an end point in the assay.

[0175] In utilizing such cell systems, cells may be exposed to a compound suspected of exhibiting an ability to ameliorate developmental or cell differentiation disorder symptoms, at a sufficient concentration and for a time sufficient to elicit such an amelioration of such disorder symptoms in the exposed cells. After exposure, the cells can be assayed to measure alterations in the expression of the gene encoding the peptide or protein of interest of the current invention, e.g., by assaying cell lysates for the appropriate mRNA transcripts (e.g. by Northern analysis) or for expression of the peptide or protein of interest of the current invention in the cell; compounds which regulate or modulate expression of the gene encoding the peptide or protein of interest of the current invention are valuable candidates as therapeutics. Alternatively, the cells are examined to determine whether one or more developmental or cell differentiation disorder-like cellular phenotypes has been altered to resemble a more normal or more wild type phenotype, or a phenotype more likely to produce a lower incidence or severity of disorder symptoms. Still further, the expression and/or activity of components of pathways or functionally or physiologically connected peptides or proteins of which the peptide or protein of interest of the current invention is a part, can be assayed.

[0176] For example, after exposure of the cells, cell lysates can be assayed for the presence of increased levels of the test compound as compared to lysates derived from unexposed control cells. The ability of a test compound to inhibit production of the assay compound such systems indicates that the test compound inhibits signal transduction initiated by the peptide or protein of interest of the current invention. Finally, a change in cellular morphology of intact cells may be assayed using techniques well known to those of skill in the art.

[0177] In addition, animal-based development or cell differentiation disorder systems, which may include, for example, mice, may be used to identify compounds capable of ameliorating development or cell differentiation disorder-like symptoms. Such animal models may be used as test systems for the identification of drugs, pharmaceuticals, therapies and interventions which may be effective in treating such disorders. For example, animal models may be exposed to a compound, suspected of exhibiting an ability to ameliorate development or cell differentiation disorder symptoms at a sufficient concentration and for a time sufficient to elicit such an amelioration of development and/or cell differentiation disorder symptoms in the exposed animals. The response of the animals to the exposure may be monitored by assessing the reversal of disorders associated with development and/or cell differentiation disorders. With regard to intervention, any treatments which reverse any aspect of development or cell differentiation disorder-like symptoms should be considered as candidates for human development and/or cell differentiation disorder therapeutic intervention. Dosages of test agents may be determined by deriving dose-response curves, as discussed below.

### 5.7 The Treatment of Disorders Associated with Stimulation of Peptides and Proteins of the Current Invention

[0178] The invention also encompasses methods and compositions for modifying development and cell differentiation and treating development and cell differentiation disorders. For example, one may decrease the level of expression of one or more genes of the current invention, and/or downregulate activity of one or more of the peptides or proteins of interest of the current invention. Thereby, the response of cells, like, for example, ES cells, to factors which activate the physiological responses that enhance the pathological processes leading to developmental and cell differentiation disorders may be reduced and the symptoms ameliorated. Conversely, the response of cells, like, for example, ES cells, to physiological stimuli involving any of the peptides or proteins of the current invention and necessary for proper developmental and cell differentiation processes may be augmented by increasing the activity of one or several of the peptides or proteins of interest of the current invention. Different approaches are discussed below.

### 5.7.1 Inhibition of Peptides and Proteins of the Current Invention of Reduce Development and Cell differentiation Disorders

[0179] Any method which neutralizes the catalytic or signal transduction activity of the peptides and proteins of the current invention or which inhibits expression of the genes encoding peptides and proteins (either transcription or translation) can be used to reduce symptoms associated with developmental and cell differentiation disorders.

[0180] In one embodiment, immuno therapy can be designed to reduce the level of endogenous gene expression for the peptides and proteins of the current invention, e.g., using antisense or ribozyme approaches to inhibit or prevent translation of mRNA transcripts; triple helix approaches to inhibit transcription of the genes; or targeted homologous recombination to inactivate or “knock out” the genes or its endogenous promoter.

[0181] Antisense approaches involve the design of oligonucleotides (either DNA or RNA) that are complementary to mRNA specific for peptides and proteins of interest of the current invention. The antisense oligonucleotides will bind to the complementary mRNA transcripts and prevent translation. Absolute complementarity, although preferred, is not required. A sequence “complementary” to a portion of an RNA, as referred to herein, means a sequence having sufficient complementarity to be able to hybridize with the RNA, forming a stable duplex. In the case of double-stranded antisense nucleic acids, a single strand of the duplex DNA may thus be tested, or triplex formation may be assayed. The ability to hybridize will depend on both the degree of complementarity and the length of the antisense nucleic acid. Generally, the longer the hybridizing nucleic acid, the more base mismatches with an RNA it may contain and still form a stable duplex (or triplex, as the case may be). One skilled in the art can ascertain a tolerable degree of mismatch by use of standard procedures to determine the melting point of the hybridized complex.

[0182] Oligonucleotides that are complementary to the 5′ end of the message, e.g., the 5′ untranslated sequence up to and including the AUG initiation codon, should work most efficiently at inhibiting translation. However, sequences complementary to the 3′ untranslated sequences of mRNAs have recently shown to be effective at inhibiting translation of mRNAs as well. See generally, Wagner, R., 1994, Nature 372:333-335. Thus, oligonucleotides complementary to either the 5′- or 3′-non-translated, non-coding regions of the mRNAs specific for the peptides and proteins of the current invention could be used in an antisense approach to inhibit translation of those endogenous mRNAs. Oligonucleotides complementary to the 5′ untranslated region of the mRNA should include the complement of the AUG start codon. Antisense oligonucleotides complementary to mRNA coding regions are less efficient inhibitors of translation but could be used in accordance with the invention. Whether designed to hybridize to the 5′-, 3′- or coding region of an mRNA, antisense nucleic acids should be at least six nucleotides in length, and are preferably oligonucleotides ranging from 6 to about 50 nucleotides in length. In specific aspects the oligonucleotide is at least 10 nucleotides, at least 17 nucleotides, at least 25 nucleotides or at least 50 nucleotides.

[0183] Regardless of the choice of target sequence, it is preferred that in vitro studies are first performed to quantitate the ability of the antisense oligonucleotide to inhibit gene expression. It is preferred that these studies utilize controls that distinguish between antisense gene inhibition and nonspecific biological effects of oligonucleotides. It is also preferred that these studies compare levels of the target RNA or protein with that of an internal control RNA or protein. Additionally, it is envisioned that results obtained using the antisense oligonucleotide are compared with those obtained using a control oligonucleotide. It is preferred that the control oligonucleotide is of approximately the same length as the test oligonucleotide and that the nucleotide sequence of the oligonucleotide differs from the antisense sequence no more than is necessary to prevent specific hybridization to the target sequence.

[0184] The oligonucleotides can be DNA or RNA or chimeric mixtures or derivatives or modified versions thereof, single-stranded or double-stranded. The oligonucleotide can be modified at the base moiety, sugar moiety, or phosphate backbone, for example, to improve stability of the molecule, hybridization, etc. The oligonucleotide may include other appended groups such as peptides (e.g., for targeting host cell receptors in vivo), or agents facilitating transport across the cell membrane (see, e.g., Letsinger et al., 1989, Proc. Natl. Acad. Sci. U.S.A. 86:6553-6556; Lemaitre et al., 1987, Proc. Natl. Acad. Sci. 84:648-652; PCT Publication No. WO88/09810, published Dec. 15, 1988), or hybridization-triggered cleavage agents. (See, e.g., Krol et al., 1988, BioTechniques 6:958-976) or intercalating agents. (See, e.g., Zon, 1988, Pharm. Res. 5:539-549). To this end, the oligonucleotide may be conjugated to another molecule, e.g., a peptide, hybridization triggered cross-linking agent, transport agent, hybridization-triggered cleavage agent, etc.

[0185] The antisense oligonucleotide may comprise at least one modified base moiety which is selected from the group including, but not limited to, 5-fluorouracil, 5-bromouracil, 5-chlorouracil, 5-iodouracil, hypoxanthine, xantine, 4-acetylcytosine, 5-(carboxyhydroxylmethyl) uracil, 5-carboxymethylaminomethyl-2-thiouridine, 5-carboxymethylaminomethyluracil, dihydrouracil, beta-D-galactosylqueosine, inosine, N6-isopentenyladenine, 1-methylguanine, 1-methylinosine, 2,2-dimethylguanine, 2-methyladenine, 2-methylguanine, 3-methylcytosine, 5-methylcytosine, N6-adenine, 7-methylguanine, 5-methylaminomethyluracil, 5-methoxyaminomethyl-2-thiouracil, beta-D-mannosylqueosine, 5′-methoxycarboxymethyluracil, 5-methoxyuracil, 2-methylthio-N6-isopentenyladenine, uracil-5-oxyacetic acid (v), wybutoxosine, pseudouracil, queosine, 2-thiocytosine, 5-methyl-2-thiouracil, 2-thiouracil, 4-thiouracil, 5-methyluracil, uracil-5-oxyacetic acid methylester, uracil-5-oxyacetic acid (v), 5-methyl-2-thiouracil, 3-(3-amino-3-N-2-carboxypropyl)uracil, (acp3)w, and 2,6-diaminopurine.

[0186] The antisense oligonucleotide may also comprise at least one modified sugar moiety selected from the group including, but not limited to, arabinose, 2-fluoroarabinose, xylulose, and hexose.

[0187] In another embodiment, the antisense oligonucleotide comprises at least one modified phosphate backbone selected from the group consisting of a phosphorothioate, a phosphorodithioate, a phosphoramidothioate, a phosphoramidate, a phosphordiamidate, a methylphosphonate, an alkyl phosphotriester and a formacetal or analog thereof.

[0188] In yet another embodiment, the antisense oligonucleotide is an alpha-anomeric oligonucleotide. An alpha-anomeric oligonucleotide forms specific double-stranded hybrids with complementary RNA in which, contrary to the usual alpha-units, the strands run parallel to each other (Gautier et al., 1987, Nucl. Acids Res. 15:6625-6641). The oligonucleotide is a 2′-0-methylribonucleotide (Inoue et al., 1987, Nucl. Acids Res. 15:6131-6148), or a chimeric. RNA-DNA analogue (Inoue et al., 1987, FEBS Lett. 215:327-330).

[0189] Oligonucleotides of the invention may be synthesized by standard methods known in the art, e.g. by use of an automated DNA synthesizer (such as are commercially available from Biosearch, Applied Biosystems, etc.). As examples, phosphorothioate oligonucleotides may be synthesized by the method of Stein et al., 1988, Nucl. Acids Res. 16:3209. Methylphosphonate oligonucleotides can be prepared by use of controlled pore glass polymer supports (Sarin et al., 1988, Proc. Natl. Acad. Sci. U.S.A. 85:7448-7451).

[0190] While antisense nucleotides complementary to the coding region sequence specific for the peptides and proteins of the current invention could be used, those complementary to the transcribed untranslated region are most preferred.

[0191] The antisense molecules should be delivered to cells which express the peptides and proteins of interest of the current invention in vivo, like, for example, ES cells. A number of methods have been developed for delivering antisense DNA or RNA to cells; e.g., antisense molecules can be injected directly into the tissue or cell derivation site, or modified antisense molecules, designed to target the desired cells (e.g., antisense linked to peptides or antibodies that specifically bind receptors or antigens expressed on the target cell surface) can be administered systemically.

[0192] However, it is often difficult to achieve intracellular concentrations of antisense molecules that are sufficient to suppress translation of endogenous mRNAs. Therefore a preferred approach utilizes a recombinant DNA construct in which the antisense oligonucleotide is placed under the control of a strong pol III or pol II promoter. The use of such a construct to transfect target cells in the patient will result in the transcription of sufficient amounts of single stranded RNAs that will form complementary base pairs with the endogenous transcripts specific for the peptides and proteins of interest of the current invention and thereby prevent translation of the respective mRNAs. For example, a vector can be introduced in vivo such that it is taken up by a cell and directs the transcription of an antisense RNA. Such a vector can remain episomal or become chromosomally integrated, as long as it can be transcribed to produce the desired antisense RNA. Such vectors can be constructed by recombinant DNA technology methods standard in the art. Vectors can be plasmid, viral, or others known in the art, used for replication and expression in mammalian cells. Expression of the sequence encoding the antisense RNA can be by any promoter known in the art to act in mammalian, preferably human cells. Such promoters can be inducible or constitutive. Such promoters include, but are not limited to: the SV40 early promoter region (Bemoist and Chambon, 1981, Nature 290:304-310), the promoter contained in the 3′ long terminal repeat of Rous sarcoma virus (Yamamoto et al., 1980, Cell 22:787-797), the herpes thymidine kinase promoter (Wagner et al., 1981, Proc. Natl. Acad. Sci. U.S.A. 78:1441-1445), the regulatory sequences of the metallothionein gene (Brinster et al., 1982, Nature 296:39-42), etc. Any type of plasmid, cosmid, YAC or viral vector can be used to prepare the recombinant DNA construct which can be introduced directly into the tissue or cell derivation site; e.g., the bone marrow. Alternatively, viral vectors can be used which selectively infect the desired tissue or cell type; (e.g., viruses which infect cells of hematopoietic lineage), in which case administration may be accomplished by another route (e.g., systemically).

[0193] Ribozyme molecules designed to catalytically cleave mRNA transcripts specific for the peptides and proteins of interest of the current invention can also be used to prevent translation of the mRNAs of interest and expression of the peptides and proteins encoded by those mRNAs. (See, e.g., PCT International Publication WO90/11364, published Oct. 4, 1990; Sarver et al., 1990, Science 247:1222-1225). While ribozymes that cleave mRNA at site specific recognition sequences can be used to destroy mRNAs, the use of hammerhead ribozymes is preferred. Hammerhead ribozymes cleave mRNAs at locations dictated by flanking regions that form complementary base pairs with the target mRNA. The sole requirement is that the target mRNA have the following sequence of two bases: 5′-UG-3′. The construction and production of hammerhead ribozymes is well known in the art and is described more fully in Haseloff and Gerlach, 1988, Nature, 334:585-591. Preferably the ribozyme is engineered so that the cleavage recognition site is located near the 5′ end of the mRNA of interest; i.e., to increase efficiency and minimize the intracellular accumulation of non-functional mRNA transcripts.

[0194] The ribozymes of the present invention also include RNA endoribonucleases (hereinafter “Cech-type ribozymes”) such as the one which occurs naturally in Tetrahymena Thermophila (known as the IVS, or L-19 IVS RNA) and which has been extensively described by Thomas Cech and collaborators (Zaug et al., 1984, Science, 224:574-578; Zaug and Cech, 1986, Science, 231:470-475; Zaug et al., 1986, Nature, 324:429-433; published International Patent Application No. WO 88/04300 by University Patents Inc.; Been and Cech, 1986, Cell, 47:207-216). The Cech-type ribozymes have an eight base pair active site which hybridizes to a target RNA sequence where after cleavage of the target RNA takes place. The invention encompasses those Cech-type ribozymes which target eight base-pair active site sequences that are present in the mRNAs specific for the peptides and proteins of interest of the current invention.

[0195] As in the antisense approach, the ribozymes can be composed of modified oligonucleotides (e.g. for improved stability, targeting, etc.) and should be delivered to cells which express the peptides and proteins of interest of the current invention in vivo, like, for example, ES cells. A preferred method of delivery involves using a DNA construct “encoding” the ribozyme under the control of a strong constitutive pol III or pol II promoter, so that transfected cells will produce sufficient quantities of the ribozyme to destroy the endogenous messages specific for the peptides and proteins of interest of the current invention and inhibit translation. Because ribozymes unlike antisense molecules, are catalytic, a lower intracellular concentration is required for efficiency.

[0196] Endogenous gene expression can also be reduced by inactivating or “knocking out” the gene of interest specific for a peptide or protein of the current invention or its promoter using targeted homologous recombination. (e.g., see Smithies et al., 1985, Nature 317:230-234; Thomas & Capecchi, 1987, Cell 51:503-512; Thompson et al., 1989 Cell 5:313-321; each of which is incorporated by reference herein in its entirety). For example, a mutant, non-functional peptide or protein of interest of the current invention (or a completely unrelated DNA sequence) flanked by DNA homologous to the endogenous gene encoding said peptide or protein of interest of the current invention (either the coding regions or regulatory regions of the gene) can be used, with or without a selectable marker and/or a negative selectable marker, to transfect cells that express said peptide or protein of interest of the current invention in vivo. Insertion of the DNA construct, via targeted homologous recombination, results in inactivation of the targeted endogenous gene. Such approaches are particularly suited in the agricultural field where modifications to ES cells can be used to generate animal offspring with an inactive copy of a gene encoding a peptide or protein of interest of the current invention (e.g., see Thomas & Capecchi 1987 and Thompson 1989, supra). However this approach can be adapted for use in humans provided the recombinant DNA constructs are directly administered or targeted to the required site in vivo using appropriate viral vectors.

[0197] Alternatively, endogenous expression of a gene of interest can be reduced by targeting deoxyribonucleotide sequences complementary to the regulatory region of said gene (i.e., the promoter and/or enhancers) to form triple helical structures that prevent transcription of the gene of interest in target cells in the body. (See generally, Helene, C. 1991, Anticancer Drug Des., 6(6):569-84; Helene, C. et al., 1992, Ann, N.Y. Acad. Sci., 660:27-36; and Maher, L. J., 1992, Bioassays 14(12):807-15).

[0198] In yet another embodiment of the invention, the activity of a peptide or protein of interest of the current invention can be reduced using a “dominant negative” approach. A dominant negative approach takes advantage of the interaction of the peptides or proteins of interest with other peptides or proteins to form complexes, the formation of which is a prerequisite for the peptide or protein of interest of the current invention to exert its physiological activity. To this end, constructs which encode a defective form of the peptide or protein of interest of the current invention can be used in gene therapy approaches to diminish the activity of said peptide or protein of interest in appropriate target cells. Alternatively, targeted homologous recombination can be utilized to introduce such deletions or mutations into the subject's endogenous gene encoding the peptide or protein of interest of the current invention in the appropriate tissue. The engineered cells will express non-functional copies of the peptide or protein of interest of the current invention, thereby downregulating its activity in vivo. Such engineered cells should demonstrate a diminished response to physiological stimuli of the activity of the affected peptide or protein of interest of the current invention, resulting in reduction of the development or cell differentiation disorder phenotype.

### 5.7.2 Restoration or Increase in Expression or Activity of A Peptide or Protein of the Current Invention to Promote Development or Cell Differentiation

[0199] With respect to an increase in the level of normal gene expression and/or gene product activity specific for any of the peptides and proteins of interest of the current invention, the respective nucleic acid sequences can be utilized for the treatment of development and cell differentiation disorders. Where the cause of the development or cell differentiation dysfunction is a defective peptide or protein of the current invention, treatment can be administered, for example, in the form of gene delivery or gene therapy. Specifically, one or more copies of a normal gene or a portion of the gene that directs the production of a gene product exhibiting normal function of the appropriate peptide or protein of the current invention, may be inserted into the appropriate cells within a patient or animal subject, optionally using suitable vectors. Recombinant retroviruses have been widely used in gene transfer or gene delivery experiments and even human clinical trials (see generally, Mulligan, R. C., Chapter 8, In: Experimental Manipulation of Gene Expression, Academic Press, pp. 155-173 (1983); Coffin, J., In: RNA Tumor Viruses, Weiss, R. et al. (eds.), Cold Spring Harbor Laboratory, Vol. 2, pp. 36-38 (1985). Other eucaryotic viruses which have been used as vectors to transduce mammalian cells include adenovirus, papilloma virus, herpes virus, adeno-associated virus, vaccinia virus, rabies virus, and the like (See generally, Sambrook et al., Molecular Cloning, Cold Spring Harbor Laboratory Press, Cold Spring Harbor, N.Y., Vol. 3:16.1-16.89 (1989). Alternatively, cationic or other lipids may be employed to deliver polynucleotides comprising (or including) the described GTS sequences to patients. Additionally, naked DNA comprising one or more GTS sequences, optionally modified by the addition of one or more of, in operable combination and orientation, a promoter, an enhancer, a ribosome entry or ribosome binding site, and/or an in-frame translation initiation codon can be employed to deliver GTSs to a patient. Another use of the above constructs includes “naked” DNA vaccines that can be introduced in vivo alone, or in conjunction with excipients, or microcarrier spheres, nanoparticles or other supporting or dosaging compounds or molecules.

[0200] The gene replacement/delivery therapies described above should be capable of delivering gene sequences to the cell types within patients which express the peptide or protein of interest of the current invention. Alternatively, targeted homologous recombination can be utilized to correct the defective endogenous gene in the appropriate cell type. In animals, targeted homologous recombination can be used to correct the defect in ES cells in order to generate offspring with a corrected trait.

[0201] Finally, compounds identified in the assays described above that stimulate, enhance, or modify the activity of the peptides and proteins of the current invention can be used to achieve proper development and cell differentiation. The formulation and mode of administration will depend upon the physico-chemical properties of the compound.

### 5.8 Pharmaceutical Preparations and Methods of Administration

[0202] Compounds that are determined to affect gene expression of the peptides and proteins of the current invention, comprise nucleotide sequence information that is at least partially first disclosed in the Sequence Listing (i.e., sequences used in antisense, gene therapy, dsRNA, or ribozyme applications), or the interaction of such peptides and proteins with any of their binding partners, can be administered to a patient at therapeutically effective doses to treat or ameliorate development and cell differentiation disorders. A therapeutically effective dose refers to that amount of the compound sufficient to result in any amelioration or retardation of disease symptoms, or development and cell differentiation or proliferation disorders.

### 5.8.1 Effective Dose

[0203] Toxicity and therapeutic efficacy of such compounds can be determined by standard pharmaceutical procedures in cell cultures or experimental animals, e.g., for determining the LD₅₀ (the dose lethal to 50% of the population) and the ED₅₀ (the dose therapeutically effective in 50% of the population). The dose ratio between toxic and therapeutic effects is the therapeutic index a it can be expressed as the ratio LD₅₀/ED₅₀. Compounds which exhibit large therapeutic indices are preferred. While compounds that exhibit toxic side effects may be used, care should be taken to design a delivery system that targets such compounds to the site of affected tissue in order to minimize potential damage to uninfected cells and, thereby, reduce side effects.

[0204] The data obtained from the cell culture assays and animal studies can be used in formulating a range of dosage for use in humans. The dosage of such compounds lies preferably within a range of circulating concentrations that include the ED₅₀ with little or no toxicity. The dosage may vary within this range depending upon the dosage form employed and the route of administration utilized. For any compound used in the method of the invention, the therapeutically effective dose can be estimated initially from cell culture assays. A dose may be formulated in animal models to achieve a circulating plasma concentration range that includes the IC₅₀ (i.e., the concentration of the test compound which achieves a half-maximal inhibition of symptoms) as determined in cell culture. Such information can be used to more accurately determine useful doses in humans. Levels in plasma may be measured, for example, by high performance liquid chromatography.

[0205] When the therapeutic treatment of disease is contemplated, the appropriate dosage may also be determined using animal studies to determine the maximal tolerable dose, or MTD, of a bioactive agent per kilogram weight of the test subject. In general, at least one animal species tested is mammalian. Those skilled in the art regularly extrapolate doses for efficacy and avoiding toxicity to other species, including human. Before human studies of efficacy are undertaken, Phase I clinical studies in normal subjects help establish safe doses.

[0206] Additionally, the bioactive agent may be complexed with a variety of well established compounds or structures that, for instance, enhance the stability of the bioactive agent, or otherwise enhance its pharmacological properties (e.g., increase in vivo half-life, reduce toxicity, etc.).

[0207] The above therapeutic agents will be administered by any number of methods known to those of ordinary skill in the art including, but not limited to, administration by inhalation; by subcutaneous (sub-q), intravenous (I.V.), intraperitoneal (I.P.), intramuscular (I.M.), or intrathecal injection; or as a topically applied agent (transderm, ointments, creams, salves, eye drops, and the like).

### 5.8.2 Formulations and Use

[0208] Pharmaceutical compositions for use in accordance with the present invention may be formulated in conventional manner using one or more physiologically acceptable carriers or excipients.

[0209] Thus, the compounds and their physiologically acceptable salts and solvates may be formulated for administration by inhalation or insufflation (either through the mouth or the nose) or oral, buccal, parenteral or rectal administration.

[0210] For oral administration, the pharmaceutical compositions may take the form of for example, tablets or capsules prepared by conventional means with pharmaceutically acceptable excipients such as binding agents (e.g., pregelatinised maize starch, polyvinylpyrrolidone or hydroxypropyl methylcellulose); fillers (e.g., lactose, microcrystalline cellulose or calcium hydrogen phosphate); lubricants (e.g., magnesium stearate, talc or silica); disintegrants (e.g., potato starch or sodium starch glycolate); or wetting agents (e.g., sodium lauryl sulphate). The tablets may be coated by methods well known in the art. Liquid preparations for oral administration may take the form of, for example, solutions, syrups or suspensions, or they may be presented as a dry product for constitution with water or other suitable vehicle before use. Such liquid preparations may be prepared by conventional means with pharmaceutically acceptable additives such as suspending agents (e.g., sorbitol syrup, cellulose derivatives or hydrogenated edible fats); emulsifying agents (e.g., lecithin or acacia); non-aqueous vehicles (e.g., almond oil, oily esters, ethyl alcohol or fractionated vegetable oils); and preservatives (e.g., methyl or propyl-p-hydroxybenzoates or sorbic acid). The preparations may also contain buffer salts, flavoring, coloring and sweetening agents as appropriate.

[0211] Preparations for oral administration may be suitably formulated to give controlled release of the active compound.

[0212] For buccal administration the compositions may take the form of tablets or lozenges formulated in conventional manner.

[0213] For administration by inhalation, the compounds for use according to the present invention are conveniently delivered in the form of an aerosol spray presentation from pressurized packs or a nebulizer, with the use of a suitable propellant, e.g., dichlorodifluoromethane, trichlorofluoromethane, dichlorotetrafluoroethane, carbon dioxide or other suitable gas. In the case of a pressurized aerosol, the dosage unit may be determined by providing a valve to deliver a metered amount. Capsules and cartridges of e.g. gelatin for use in an inhaler or insufflator may be formulated containing a powder mix of the compound and a suitable powder base such as lactose or starch.

[0214] The compounds may be formulated for parenteral administration by injection, e.g., by bolus injection or continuous infusion. Formulations for injection may be presented in unit dosage form, e.g., in ampules or in multi-dose containers, with an added preservative. The compositions may take such forms as suspensions, solutions or emulsions in oily or aqueous vehicles, and may contain formulatory agents such as suspending, stabilizing and/or dispersing agents. Alternatively, the active ingredient may be in powder form for constitution with a suitable vehicle, e.g., sterile pyrogen-free water, before use.

[0215] The compounds may also be formulated as compositions for rectal administration such as suppositories or retention enemas, e.g., containing conventional suppository bases such as cocoa butter or other glycerides.

[0216] In addition to the formulations described previously, the compounds may also be formulated as a depot preparation. Such long acting formulations may be administered by implantation (for example subcutaneously or intramuscularly) or by intramuscular injection. Thus, for example, the compounds may be formulated with suitable polymeric or hydrophobic materials (for example as an emulsion in an acceptable oil) or ion exchange resins, or as sparingly soluble derivatives, for example, as a sparingly soluble salt. The compositions may, if desired, be presented in a pack or dispenser device which may contain one or more unit dosage forms containing the active ingredient. The pack may, for example, comprise metal or plastic foil, such as a blister pack. The pack or dispenser device may be accompanied by instructions for administration.

[0217] The examples below are provided to illustrate the subject invention. These examples are provided by way of illustration and are not included for the purpose of limiting the invention in any way whatsoever.

### 6. EXAMPLES

### 6.1 Construction of Trapped cDNA Libraries

[0218] The GTSs represented in SEQ ID NOS:9-1008 were generated using normalized cDNA libraries produced as described in U.S. application Ser. No. 60/095,989, filed Aug. 10, 1998 entitled “Construction of Normalized cDNA Libraries From Animal Cells” (also identified as attorney docket no. 8535-021-888), by Nehls et al., the disclosure of which is herein incorporated by reference in its entirety.

[0219] FIG. 1A provides a representative illustration of the retroviral vector used to produce the described polynucleotides. In brief, pools of modified human PA-1 teratocarcinoma cells (e.g., PA-2, PA-1 that has been transfected to express the murine ecotropic retrovirus receptor) were typically infected at an m.o.i. between about 0.01 and about 0.1 (although much higher m.o.i.'s such as 1 to more than 10 could have been used). FIG. 1B schematically shows how the target cell genomic locus is presumably mutated by the integration of the retroviral construct into intronic sequences of the cellular gene. The integrated retrovirus results in the generation of two chimeric transcripts. As illustrated in FIG. 1C, the first chimeric transcript is a fusion between the coding region of the resistance marker (neo was used to produce the presently described GTSs) carried within the transgenic construct and the downstream exon(s) from the cellular gene. A mature transcript is generated when the indicated splice donor (SD) and splice acceptor (SA) sites are spliced. Translation of this fusion transcript produces the protein encoded by the resistance marker and allows for selection of gene trapped target cells, although selection is not required to produce the described polynucleotides.

[0220] Another chimeric transcript is shown in FIG. 1C. This transcript is a fusion between the first exon of the transgenic construct (EXON1—the first exon of the murine btk gene was used as the sequence acquisition component for the described GTSs) and downstream exons from the cellular genome. Unlike the transcript encoding the selectable marker exon, the transcript encoding EXON1 is transcribed under the control of a vector encoded, and hence exogenously added, promoter (such as the PGK promoter), and the corresponding mRNA is generated by splicing between the indicated SD and SA sites. The region encoding the sequence acquisition exon (EXON1) has also been engineered to incorporate a unique sequence that permits the selective enrichment of the fusion transcript using molecular biological methods such as, for example, the polymerase chain reaction (PCR). These sequences serve as unique primer binding sites for EXON1—specific PCR amplification of the transcript and can additionally incorporate one or several rare-cutter endonuclease restriction sites to allow site-specific cloning. These features allow for the efficient and preferential cloning of transgene expressed fusion transcripts from pools of target cells relative to the background of cellularly encoded transcripts.

[0221] Based on the unique sequence present in EXON1, that is schematically indicated as a rare-cutter (A) restriction site in FIG. 1B, selective cloning of the fusion transcript is achieved as shown in FIG. 1D. cDNA was generated by reverse transcribing isolated RNA from pools of cells that have undergone independent gene trap events using, for example, RTT-1 as a deoxyoligonucleotide primer. The 3′ end of the RTT-1 primer consisted of a homopolymeric stretch of deoxythymidine residues that bound to the polyadenylated end of the mRNA. At its 5′ end, the oligonucleotide contained a sequence that can serve as a binding site for a second and a third primer (GET-2 and GET-2N). In the center, RTT-1 contains the sequence of a second rare-cutter (B) restriction site. Depending on the size of the pool and the transcriptional levels of the fusion transcript, second strand synthesis was carried out either with deoxyoligonucleotide primer BTK-1 using Klenow polymerase or by a polymerase chain reaction (PCR) in the presence of primers BTK-1 and GET-2.

[0222] The second strand reaction products that were generated by PCR were digested with restriction endonucleases that recognize their corresponding restriction site (e.g., A and B). Additionally, PCR conditions were suitably modified using a variety of established procedures for enhancing the size of the PCR products. Such methods are described, inter alia, in U.S. Pat. No. 5,556,772, and/or the PanVera (Madison, Wis.) New Technologies for Biomedical Research catalog (1997/98) both of which are herein incorporated by reference.

[0223] Prior to cloning, the PCR cDNA fragments were size-selected using conventional methods such as, for example, chromatography, gel-electrophoresis, and the like. Alternatively or in addition to this size selection, the PCR term plates could have been previously size selected into separate template pools.

[0224] After digestion with suitable restriction enzymes, and size selection as described above, the cleaved cDNAs were directionally cloned into phage vectors (see FIG. 1D), although any other cloning vector/vehicle could have been used. Such vectors are generically referred to as gene trapped sequence vectors, or “GTS vectors” in FIG. 1D), preferably incorporating a multiple cloning site with restriction sites corresponding to those incorporated into the amplified cDNAs (e.g., Sfi I, which allows for directional cloning of the cDNAs). After cloning, the resulting phage were handled as a conventional cDNA library using standard procedures. Individual colonies and/or plaques were picked and used to generate PCR derived (using the primers indicated below) templates for DNA sequencing reactions.

[0225] A more detailed description of the above follows. The btk gene trap vector was introduced into human PA-2 cells using standard techniques. In brief, vector/virus containing supernatant from GP+E or AM12 packaging cells was added to approximately 50,000 cells (at an input ratio between about 0.1 and about 0.1 virus/target cell) for between about 16 to about 24 hours, and the cells were subsequently selected with G418 at active concentration of about 400 micrograms/ml for about 10 days. Between about 600 and about 3,000 G418 resistant colonies were subsequently pooled, and subjected to RNA isolation, reverse transcription, PCR, restriction digestion, size selection, and subcloning into lambda phage vectors. Individual phage plaques were directly amplified, purified, and sequenced to obtain the corresponding GTS.

[0226] When selection is not used, about 1×10⁶ cells (PA-2, Hela, HepG2, or Jurkatt cells) per 100 mm dish were plated and infected with AM12 packaged btk retrovirus at an m.o.i. of approximately 0.01. After a 16 h incubation, the cells were washed in PBS and grown in culture media for four days. RNA from each plate was extracted, reverse transcribed, and the resulting cDNA was subject to two rounds of PCR, each for 25 cycles. The resulting PCR products were digested with Sfi and separated by gel electrophoresis. Six size fractions (between about 300 and about 4,000 bp) were recovered and each fraction was ligated into lambdaGT10Sfi arms, in vitro packaged, and plated for lysis. Individual plaques were picked from the plates, subject to an additional round of PCR, and subsequently sequenced to obtain the described GTSs. The particulars are described in greater detail below.

[0227] FIG. 1 shows the chimeric fusion transcript that is formed when the first exon of the transgenic construct (EXON1—the first exon of the murine btk gene was used as the sequence acquisition component for the described GTSs) is spliced to downstream exons from the cellular genome. Unlike the transcript encoding the selectable marker exon, the transcript encoding EXON1 is transcribed under the control of a vector encoded, and hence exogenously added, promoter (such as the PGK promoter), and the corresponding mRNA is generated by splicing between the indicated SD and SA sites. The region encoding the sequence acquisition exon (EXON1) has also been engineered to incorporate a unique sequence that permits the selective enrichment of the fusion transcript using molecular biological methods such as, for example, the polymerase chain reaction (PCR). These sequences serve as unique primer binding sites for EXON1-specific PCR amplification of the transcript and can additionally incorporate one or several rare-cutter endonuclease restriction sites to allow site-specific cloning. These features allow for the efficient and preferential cloning of transgene expressed fusion transcripts from pools of target cells relative to the background of cellularly encoded transcripts.

[0228] Based on the unique sequence present in EXON1, that is schematically indicated as a rare-cutter (A) restriction site in FIG. 1B, selective cloning of the fusion transcript is achieved as shown in FIG. 1D. cDNA was generated by reverse transcribing isolated RNA from pools of cells that have undergone independent gene trap events using, for example, RTT-1 as a deoxyoligonucleotide primer. The 3′ end of the RTT-1 primer consisted of a homopolymeric stretch of deoxythymidine residues that bound to the polyadenylated end of the mRNA. At its 5′ end, the oligonucleotide contained a sequence that can serve as a binding site for a second and a third primer (GET-2 and GET-2N). In the center, RTT-1 contains the sequence of a second rare-cutter (B) restriction site. Depending on the size of the pool and the transcriptional levels of the fusion transcript, second strand synthesis was carried out either with deoxyoligonucleotide primer BTK-1 using Klenow polymerase or by a polymerase chain reaction (PCR) in the presence of primers BTK-1 and GET-2.

[0229] The second strand reaction products that were generated by PCR were digested with restriction endonucleases that recognize their corresponding restriction site (e.g., A and B). Additionally, PCR conditions were suitably modified using a variety of established procedures for enhancing the size of the PCR products. Such methods are described, inter alia, in U.S. Pat. No. 5,556,772, and/or the PanVera (Madison, Wis.) New Technologies for Biomedical Research catalog (1997/98) both of which are herein incorporated by reference.

[0230] Prior to cloning, the PCR cDNA fragments were size-selected using conventional methods such as, for example, chromatography, gel-electrophoresis, and the like. Alternatively or in addition to this size selection, the PCR templates could have been previously size selected into separate template pools.

[0231] After digestion with suitable restriction enzymes, and size selection as described above, the cleaved cDNAs were directionally cloned into phage vectors (see FIG. 1D), although any other cloning vector/vehicle could have been used. Such vectors are generically referred to as gene trapped sequence vectors, or “GTS vectors” in FIG. 1D), preferably incorporating a multiple cloning site with restriction sites corresponding to those incorporated into the amplified cDNAs (e.g., Sfi I, which allows for directional cloning of the cDNAs). After cloning, the resulting phage were handled as a conventional cDNA library using standard procedures. Individual colonies and/or plaques were picked and used to generate PCR derived (using the primers indicated below) templates for DNA sequencing reactions.

[0232] Total cell RNA isolation was conducted using RNAzol (Friendswood, Tex., 77546) per the manufacturer's specifications. An RT premix containing 2× First Strand buffer, 100 mM Tris-HCl, pH 8.3, 150 mM KCl, 6 mM MgCl₂, 2 mM dNTPs, RNAGuard (1.5 units/reaction, Pharmacia), 20 mM DTT, RTT-1 primer (3 pmol/rxn, GenoSys Biotechnologies, sequence: 5′ tggctaggccccaggataggcctcgctggcctttttttttttttttt 3′, SEQ ID NO: 1) and Superscript II enzyme (200 units/rxn, Life Technologies) was added. The plate/tube was transferred to a thermal cycler for the RT reaction (37° C. for 5 min. 42° C. for 30 min. and 55° C. for 10 min).

[0233] The cDNA was amplified using two distinct, and preferably nested, stages of PCR. The PCR premix contained: 1.1×MGBII buffer (74 mM Tris pH 8.8, 18.3 mM Ammonium Sulfate, 7.4 mM MgCl₂, 5.5 mM 2ME, 0.011% Gelatin), 11.1% DMSO (Sigma), 1.67 mM τdNTPS, Taq (5 units/rxn), water and primers. The sequences of the first round primers are: BTK-1 5′ gccatggctccggtaggtccagag 3′, SEQ ID NO:2 (GET-2, 5′tggctaggccccaggatag 3′, SEQ ID NO:3), (about 7 pmol/rxn). The sequences of the second round primers are BTK-4 5′ gtccagagatggccatagc 3′, SEQ ID NO:4 (GET-2N 5′ ccaggataggcctcgctg 3′, SEQ ID NO:5), (used at about 20 pmol/rxn). The outer premix was added to an aliquot of cDNA and run for 20 cycles (94° C. for 45 sec., 56° C. for 60 sec 72° C. for 2-4 min). An aliqot of this product was added to the inner premix and cycled at the same temperatures 20 times.

[0234] The PCR products of the second amplification series were extracted using phenol/chloroform, chloroform, and isopropanol precipitated in the presence of glycogen/sodium acetate. After centrifugation, the nucleic acid pellets were washed with 70 percent ethanol and were resuspended in TE, pH 8. After digestion with Sfi I at 55° C., the digested products were loaded onto 0.8% agarose gels and size-selected using DEAE membranes as described (Sambrook et al., 1989, supra). Generally, six approximate size-fractions (<700 bp, 700-900 bp, 900-1,300 bp, 1,300-1,600 bp, 1,600-2,000 bp, >2,000 bp) were separately ligated into GTS vector arms that were engineered to contain the corresponding Sfi I “A” and “B” specific overhangs (i.e., TAG and GCG, respectively). The ligation products were packaged using commercially available lambda packaging extracts (Promega), and plated using E. coli strain C600 using conventional procedures (Sambrook et al., 1989, supra). Individual plaques were directly picked into 40 microliters of PCR buffer and subjected to 35 cycles of PCR [at 94° C. for 45 sec., 56° C. for 60 sec 72° C. for 1-3 min (depending on the size fraction)] using 12 pmol of the primers SEQ-4, 5′ tacagtttttcttgtgaagattg 3′, SEQ ID NO:6 and SEQ-5, 5′ gggtagtccccaccttttg 3′, SEQ ID NO:7, per PCR reaction. The cloned 3′ RACE products were purified using an S300 column equilibrated in STE essentially as described in Nehls et al., 1993, TIG,9:336-337, and the products were recovered by centrifugation at 1,200×g for 5 min. This step removes unincorporated nucleotides, oligonucleotides, and primer-dimers. The PCR products were subsequently applied to a 0.25 ml bed of Sephadex® G-50 (DNA Grade, Pharmacia Biotech AB) that was equilibrated in MilliQ H₂O, and recovered by centrifugation as described above. Purified PCR products were quantified by fluorescence using PicoGreen (Molecular Probes, Inc., Eugene, Oreg.) as per the manufacturer's instructions.

[0235] Dye terminator cycle sequencing reactions with AmpliTaq® FS DNA polymerase (Perkin Elmer Applied Biosystems, Foster City, Calif.) were carried but using 7 pmoles of primer (Oligonucleotide BTK-3; 5′ tccaagtcctggcatctcac 3′, SEQ ID NO:8) and approximately 30-120 ng of 3′ template. Unincorporated dye terminators were removed from the completed sequencing reactions using G-50 columns as described above. The reactions were dried under vacuum, resuspended in loading buffer, and electrophoresed through a 6% Long Ranger acrylamide gel (FMC BioProducts, Rockland, Me.) on an ABI Prisms 377 with XL upgrade as per the manufacturer's instructions. The sequences of the amplicons, or GTSs, are described in SEQ ID NOS:9-1008.

[0236] All publications and patents mentioned in the above specification are herein incorporated by reference. Various modifications and variations of the described method and system of the invention will be apparent to those skilled in the art without departing from the scope and spirit of the invention. Although the invention has been described in connection with specific preferred embodiments, it should be understood that the invention as claimed should not be unduly limited to such specific embodiments. Indeed, various modifications of the above-described modes for carrying out the invention which are obvious to those skilled in the field of molecular biology or related fields are intended to be within the scope of the following claims.

What is claimed is:

1. A synthetic oligonucleotide comprising a contiguous stretch of at least about 15 nucleotides first disclosed in at least one of SEQ ID NOS:9-1008.

2. An isolated cDNA polynucleotide derived from the genome of a human that is capable of hybridizing to a sequence first disclosed in at least one of SEQ ID NOS:9-1008 under stringent conditions.

3. An isolated polynucleotide comprising a contiguous stretch of at least about 60 nucleotides first disclosed in at least one of SEQ ID NOS:9-1008.

4. An isolated polynucleotide according to claim 3, wherein said polynucleotide sequence comprises at least one of SEQ ID NOS:9-1008.

5. An in vitro process for producing a polynucleotide comprising the steps of:
a) obtaining a polynucleotide template encoding a sequence capable of hybridizing to a GTS of SEQ ID NOS:9-1008;
b) combining said template with a synthetic oligonucleotide sequence of about 14 to about 80 bases in length that comprises a contiguous sequence of at least about 12 nucleotides disclosed in one of SEQ ID NOS:9-1008; and
c) processing the combined oligonucleotide and template preparation such that said oligonucleotide sequence hybridizes to said template in the presence of a DNA polymerase molecule and a sufficient concentration of dNTPs for said oligonucleotide sequence to prime DNA synthesis by said polymerase,
wherein a polynucleotide is produced that encodes at least about 50 contiguous nucleotides first disclosed in one of SEQ ID NOS:9-1008.

6. The process of claim 5 wherein said template is mammalian cDNA.

7. The process of claim 5 wherein said template is mammalian genomic DNA.

8. A process according to claim 6 wherein said templates are of human origin.

9. A process according to claim 7 wherein said templates are of human origin.

The application's sequence listing, which the Patent Office published only in electronic form, follows.

SEQUENCE LISTING (1008 sequences)

SEQ ID NO: 1 - DNA, 40 bp, Artificial Sequence
  Primer
tggctaggccccaggataggcctcgctggccttttttttt

SEQ ID NO: 2 - DNA, 24 bp, Artificial Sequence
  Primer
gccatggctccggtaggtccagag

SEQ ID NO: 3 - DNA, 19 bp, Artificial Sequence
  Primer
tggctaggccccaggatag

SEQ ID NO: 4 - DNA, 19 bp, Artificial Sequence
  Primer
gtccagagatggccatagc

SEQ ID NO: 5 - DNA, 18 bp, Artificial Sequence
  Primer
ccaggataggcctcgctg

SEQ ID NO: 6 - DNA, 23 bp, Artificial Sequence
  Primer
tacagtttttcttgtgaagattg

SEQ ID NO: 7 - DNA, 19 bp, Artificial Sequence
  Primer
gggtagtccccaccttttg

SEQ ID NO: 8 - DNA, 20 bp, Artificial Sequence
  Primer
tccaagtcctggcatctcac

SEQ ID NO: 9 - DNA, 171 bp, Homo sapiens
  misc_feature (1)...(171): n = A,T,C or G
gtncacanangannggncntgtgaggacacagcnagaagcaagtctntgcatgncnagaagaacggcctcaacagacaccanncctgccagcaccttgatcttggcttntggcctccagaactgtgaaagantaaagattctgttgtttaagccagtacaaaataaatagg

SEQ ID NO: 10 - DNA, 294 bp, Homo sapiens
agagtgtgacgatccccctgatgcggctgagatgttctgaaatgaagacgttggctctcatccccagcctgaagagagaaaattctgagatggctcccttacggattgagagcaggcactgggtaggaacacagccaagaacgattgcaggatgggtccttccaggacactgacgtctcagcttgcgcactgtgagtccctggacgagttactccacctctctgaacctcctcctcacttgcataatgggaaaaataatggacatagggagatgaaacaagaccttggagacca

SEQ ID NO: 11 - DNA, 241 bp, Homo sapiens
  misc_feature (1)...(241): n = A,T,C or G
ggatgccttctaaacagcctaccctgcccagngccatgattactgtgaccacatcttcagagccagaaaacaggatacctggccctaagcatgcactcatggagcanaagagttttaaatctgntatgccacagaagacagaagataacatgcttactacacttgtnaagcaacatgcagccagccatttccagtgcaaattatctcattgcatagtgtgacaactaaaggtcataaccat

SEQ ID NO: 12 - DNA, 197 bp, Homo sapiens
acaggatgcctgtaatcattattcagtgagcagcaacctgcagcagctcctcctgactggcagatgggcctggcggccacccagaggctggggacacagcaagaatccagcacagcaccgatcccgattccctcctccccaaactacctgagccatggacctcattttgtggacaaaattaaacttgccactttcac

SEQ ID NO: 13 - DNA, 387 bp, Homo sapiens
  misc_feature (1)...(387): n = A,T,C or G
tggtgcttactaaaaattgaataancgtggaaaagagaaaatctccctctttaaaaggaacactgttgtggacattttaaaatgcaaacgccttggctggaagtcagaaatcgtgttctctctgctaaacctggtgtagcatttaacacgcttgaagtggaggcatctggtcaccaatttcacagcctggacagagcaagaaggtgcggctggcttaggaggcggcctgccgggggggatcgtctgtccatctgggcttggtaaatgtcaagggtcatttccctgtcctgacatttgattgtgaagcaggttgcgaggtaactctttcaagggactggactgtgacagtcaccatagttggacaataaaacccgaacatccttcacc

SEQ ID NO: 14 - DNA, 326 bp, Homo sapiens
  misc_feature (1)...(326): n = A,T,C or G
ggacagtggctaactcagcagacnaaccacagcttcctgccctttgcagatggcntgaanataagagtttgccaaacaactaagatgggctcttgattgagcaaanaaaccacaacatgggacacacagagccaccctattgncctactgtcattcaagcttaaaggagacatatctacagacagggtttgagcctagtnatggnganaactttcttggatgtctcaacancctgganatgannntcccnacaaggcagaanancnaggtggnacattgntnntattgctttttattcaattataaaagtaatgcatgctttttgt

SEQ ID NO: 15 - DNA, 166 bp, Homo sapiens
tcagtatcctgacctggcaaggtgttccttaacctcccctctggatcccccttagcacacatctgggacaatggagcgttcagcaccacggacagcattacaccctcttcaagtgcttgttaaggccatttgtctatttcactctcaagtaaataaaaatattttt

SEQ ID NO: 16 - DNA, 638 bp, Homo sapiens
  misc_feature (1)...(638): n = A,T,C or G
annttnttnttgngnnannatctgannccanccagantnntactctgnggacantncatcatgacnaagtcccactgannacagacattcaagccatccatgttaganggganttgatnccnttgccttttgcnntganngnganncttcngtngccangnnganntgtngcagntcatcttgnacgacctctggctcattgcatgcctacatnatgaccaggttnnagtgattcccgtgcttcngnctcctgagaagctgggattacgggcctctgcgagactgtttcatagatgctcaagacaccagcaaaccagngccaccgaacaagtatgagaaaagaacaggctagattatgttatccagaacttcacaaccatcagatctagacagaaggaggtggacagtgaacacagaaaagctgtaaggtgtcctgtgacagatgtatgtggtggacacagcaggacccagaggaaggaagaaagaagctgctcttgaaaagaccctcaaaccacgatgctcaaggaagtgtcgagagatgaaggagaggtgtttgccaggcagagcagtagagacaagttttcgccatgttggtcaagctggtctcaaacttctaacctnacgtaatccaccccgct

SEQ ID NO: 17 - DNA, 403 bp, Homo sapiens
  misc_feature (1)...(403): n = A,T,C or G
gnaaagagaaaaacaacattcaacancaacancaatttcccgaggatccctgcccacattcanagtgncacatttacctacttnanaggggagatnaaagccncactctaaggctccttatttccacaggctggnaagcaaacanggcntacaggctttgcangagtgtatcctaattctcttactgaagaaaagtcaacagcagagacancacagaaaaaggaatcaaagaggccaaatctgnggactcaaaacaataagaaaaaataaatcaactttgctaaaatttaagaatgccaggggggtaggtaaatgcactgggaagtatgtgtggactatgatgataataaatctcctttcaatacaactgatatttatcagaccttgaataaaacactgaatg

SEQ ID NO: 18 - DNA, 103 bp, Homo sapiens
  misc_feature (1)...(103): n = A,T,C or G
actttctccaagctactcagaagactgaagcagaaggatcacttgaggccaggagttcaagatcagcctgagcaacatagngaaaccctatctctaaaaatac

SEQ ID NO: 19 - DNA, 333 bp, Homo sapiens
gatcccatcatgcttctcctgtcaaatctccttcgtctcctcacatctgggaccctttctcagtgtgtcctggcctttcataacctgcacactcttgaagaggattgccagcaatgtcggagagtgacccgcggtgggggtttgtctgaggcttactcacaattgccgtgggttatggacttgtggagagaataccacgtacgcgagtgccctttcacgacatcacgtcagggtgcagggtattgtcctgacttaccactgtgaagtcacctttgatcacttgggcaaggtgaactctgtgcatttctccaacataaagttattatttttccc

SEQ ID NO: 20 - DNA, 92 bp, Homo sapiens
gtggggtctttcaagaggatcgcttccaggaggtcaaggctgccatagcgccactgcactccagcctgggcgacagggcaaaaccctgtatc

SEQ ID NO: 21 - DNA, 259 bp, Homo sapiens
gaaatatatcatgtagttacatttcatccttggaattcctctctcctgtgagtgcaacctgatttgagatgtaaataaactgcggtgataatgccggagtctcgtcagacgcccagttctcccgccagccgaggatgggagtgatgatgaatggtgccaggcccgctgcataatcttttctgttttaatactcgattatcatgtccctcatcttccctggacccaagactcaacacattaaaatctctttgtttcttcc

SEQ ID NO: 22 - DNA, 270 bp, Homo sapiens
gtggacgtcaagaggaacacaccagtggaagaagacacaagtggctggatattgagaggaacgcactggtgaaagaacacaccaacagatgccatccagctgacaggccatccaccagtgccgcagagtttggacagggcagaaggagagcccagccactgagcagcttgactccagggcaaaaccatcttcctactccgtctcccttctagctcccccatttactgactgctatttccactcaataaagtcttgcattgattctccaag

SEQ ID NO: 23 - DNA, 260 bp, Homo sapiens
gaggaaagtcaagtgcttcttgaattcttctggtgaccctgaggtgggaggtgagaagagcagtcctgggtggactgtggcctggcagctaccatcattgccctcttcaaccacagggtcatcaaggctaccattgagtggctgctttatcagtgaagacaacacagggagaagatctcatcagaggggacttggctatttcagtgatcaaaacatgctcctaaacatggataacatcattaaaagatgccaccttcctg

SEQ ID NO: 24 - DNA, 238 bp, Homo sapiens
  misc_feature (1)...(238): n = A,T,C or G
agccttcagggaaaagcaagactgtcctgtagaagcaccaggaagatgtccaacagtgctgtagctgaaacctgggagatggggactaagctgggaagctggactgccctgattgagtgttgatcttcacccttgatggagagagccatattcttagttggccctcagcttcatggctaacnctnggggttaancnttcnnggnttggtaangnnaaangctttggacctggttttga

SEQ ID NO: 25 - DNA, 209 bp, Homo sapiens
gtatggaaaaaccacagggagagggagaagccttgagatcacatggaagagaactgaggaattgagctgacaatgagaattgaggtcccagcctatggtcccagttgtgtgttccagccagcatccagttgtttgaactgcctctatactagtaaacaagtaattaattaatacaagtaaatgaaaacaagtaataaagtaattaatac

SEQ ID NO: 26 - DNA, 528 bp, Homo sapiens
  misc_feature (1)...(528): n = A,T,C or G
actgagagaggaggctcagtttcctaaacaataagatccacgtaaagacagctgagtgaatctgactcctctccaagtttttttgcagcttactcaaaagatgaggaagctgagatccagccaagttcanatatctagtaagtgacagaacctagataccaacccaagcatcctgactccagagccttcttcgctgtaccaaaggcttaggtcactccacttgtttgtttctggtcaaacatgtgttgacaattgtgtggatgcacacctagaatgttttggaaagatctgtgaaaatatggcagtgacaagatttccttttccaatatgttttccacagtaaaacaccagacattcatgattcaacccatgtctgggattctgcacgatcaagtgccctcagtattttaagcttttggataattcatagctatcatgtctaaattgttctgcttgttctaaatttgccctgcatgtgtacctttcaagataagttctttcagctgataaactcctgtttttaaatgc

SEQ ID NO: 27 - DNA, 317 bp, Homo sapiens
gacacacaactggactacatttcccaccctcatcagcagtgagatgtgacagagttctagccaacgcagtgcatctcttcaaggcctaggacatagacaattccctcttcctcctccaggctttttctccaagctgacgggatgatgattgcccagacaaccttgggagctgtgtgttgaagatgttagaaccaccagcagtttgactttccagttaattgcatggagcggggaccctgtacctttctctgcccactcaacagaaacacccaccttgaactattatgtgatatacaaataaactccttttgtgctcg

SEQ ID NO: 28 - DNA, 482 bp, Homo sapiens
  misc_feature (1)...(482): n = A,T,C or G
atcctactggaggagaccttgaggaacactaaaatagaggaaaaagttgtttactcagacccagggagtgactggttgtgcagtggtgagcaaaacgaagcatctgcctttaactcagtgagaggatgacaataaataatcatcaaacacatcattgcaaaataggaagtgaaataaaaagaagagcatgatgaaatagagaataacatggggttgtgtatggatggaataattaaagaaggcaaggggatcctaatgaatgagaagaagacaaaaatcctggaagggaaagagctttcttgcagaaggaagactatatgcaaagacctcaggaaaatgagaaactgaaagatgggccctgtgactagcatgaagtgggtgaaggagaaatgatgtgaaatttaattggaaaaatcaccaggaattanacctcctacagccatgctgccaagatgcagaagccacttcattccttgtgctta

SEQ ID NO: 29 - DNA, 258 bp, Homo sapiens
gccccatttccaaatatcatcacaatgaagattagggcttcaacatacgaattttagaggacacaattcagtccacagcaacgatgcatagaagacaaggcaatatgaagtgagaacagaggtatttgaagctgtcagccttcaagactggagtgatgcagtgacaagccgaggccaccagaaactggaagaagcaaggaaggatcctctcctggccttcagaactttgacagaataaagtttttttttttaagctgc

SEQ ID NO: 30 - DNA, 179 bp, Homo sapiens
gtaactgaagatttacatctgtaaatctggatgggaactgaattcctacatcatagacagtttcaaggagggaaggattatgtgttcaggaaatactctgcattctcaaaactctacattgttggtgcttagatttgctctgtgagaacctactgaaataaaccatttctctggaagac

SEQ ID NO: 31 - DNA, 138 bp, Homo sapiens
agacatgttctcagtgatacctgggctgcggtacagtggcaagatgatagttcaaggcagcctggaacttgggctcaaatgatcctcctgcttcagacttctgcctcaatgctgattataataaacatattctatttc

SEQ ID NO: 32 - DNA, 478 bp, Homo sapiens
  misc_feature (1)...(478): n = A,T,C or G
gaccaggctaaaggaacagacaccactacagacgtggttctcaaggagagttggagctcaagtggggacaaggcccttgcttgccacatcacgtaaaaatcttacgtgtctttaatgcacttcacgtccaggaacctcagcttcaaagaaaaccaaacgctcatgcttcatttaattccccttattcggtcttccaaagaggtggagaatagctggtgctcactgtcccagacactgagatggcatttcaagattttctctgcaatctggtctctgaacagacttgagcctttgtctgctggttcccaaccctggttacacatcagaaccatgtgctccaggacctcacctcttggagtctgangttgagcccaggaaactctatgtctccatatttccatccagacaccctctctnttcatgaaacccttgnaaatgncttactcantctttanacatggcttaaacctcacttttt

SEQ ID NO: 33 - DNA, 227 bp, Homo sapiens
tggctggagctccagcagccatcctgtgaccctgagaacaaagccattcattgaggctaatgaagcaggaagaaggaatcctgagtccttgggaaacaaggatctacctgaatagctccgaatgcctacttctagatgtccttttaggaagagaagcacacccttgtgtatttcagccactgctatttaaggtttaacctaatcatgatattattggtttttcttgg

SEQ ID NO: 34 - DNA, 273 bp, Homo sapiens
ggcccagctcctaacatgcaggtgtcaccagagagaaatgcaccactgtgcccagcaccatagctctggctcagagagtttgcctgagaaagcagcagacagaaaacagaaggtgcgagttgctcccgaaggaactgacttcatgtgcaacagagctcggagaagtccaaggctaagcacactctccagaacagtggaggttgtgctgaaaggcaactgggaggcgacggagagcctgggaggtgcgggctacactggaggccagcaagtctg

SEQ ID NO: 35 - DNA, 366 bp, Homo sapiens
ataacagagagcgcaaacaacttgttcaaggtcattggactgaaagtgacagagccaggactctgtcccacatgcaaagactccacgcatcatgcctatgatactcagagaaagaaggctatcattataaagacctatacttgatgctagaaattcaagacgaagcctgggcaacatagcaaggctctcatctccacgaaaaagaaaaaaaattaaaaataggcatagtgaagcacactggtggtagtcttagctactcaggagactaaggtgggaggatccccgagccaaggagtttgaggctgcagtgagctatgcaaacaccactgcactccaacctgtgcaacagagaaagaccccgtctct

SEQ ID NO: 36 - DNA, 262 bp, Homo sapiens
  misc_feature (1)...(262): n = A,T,C or G
ctcttgcacatccctctttgggtcccgtttgctcagcaagacctttcttccgactgcacctctctctcctgctgcagtcaccgnctgagttgggccaggcagaatctccccaaatacttaaatgaaggcccacttcaggtttgggcctcaccgcagagctgagatgaaacatgcaaggcattcgggccccttccccttctggccccagctgaccttccacccacagcacttacactcaaataaaagaaaagtcactccctgc

SEQ ID NO: 37 - DNA, 88 bp, Homo sapiens
gataacaatacgaagatccacctgtcttgctgctgcccaagaccacacttccatccacaagttccccagtaaatcacctgctaccagc

SEQ ID NO: 38 - DNA, 119 bp, Homo sapiens
tgaagtttccagaagctacatgacacgcggttcaattccgattgaatgcggaaggagatatgacaacctcaacgtcctctattaagccatacattaaaaggacttgcaagatgtaaaat

SEQ ID NO: 39 - DNA, 253 bp, Homo sapiens
attcctctagcaagaaaggaagtgaaaaaggaaaaaaagatctactagcaattacagggaagtcaaaatgggagcaaaattgcattcatgcaaagagctcaaagaagacaactaatctttgttctaaatacaacatgggatcctcacaggtgggcacattagaaaagaccactgatcaaggaccaatcactgcagcaagtatgtgagttccataggtatatctgaatttcaaaaataaaaagatgctctcaat

SEQ ID NO: 40 - DNA, 348 bp, Homo sapiens
  misc_feature (1)...(348): n = A,T,C or G
agatggggtcttgctgtgttgcncaggctggaatgcagtggctattcacaggcatgatcactacatgctacagcctggaattcctgggctcaagtgatcctcctgccttggactcccaacaaactgggacgacaggtgcacgtgccaccatacccagcttccaggagagtttcacgcacacaggacaggatccaaaattgtcctaacttcagaggaaggattaagaacaagatttcttttcagcatcttgtgagctctacttctttttcccccctgcatggcatttggcatagtggtagcctatcctaaatatcctaattgatttaaactccattaaacattaaaaac

SEQ ID NO: 41 - DNA, 265 bp, Homo sapiens
  misc_feature (1)...(265): n = A,T,C or G
ttnccggagtgtggatgtgaacacgccgtcttgggtcctgaggtggaagccatgtgtggaagatggagggcatnggttagaaggagtctagtccctgatggtcactgagctgcagaaccagcctgggctgcttcctgctggatgtcacttactagagagcgaaattaaatgtgcttcagctactgttactttgggttttctgtcatttgtagctgaaataatcctaatcaatatgagatatattaagtaaacaaaaatgcaaatg

SEQ ID NO: 42 - DNA, 288 bp, Homo sapiens
aaaacggctaaagcaagggtggaaacagccaccaggacggactggaggtgagctgtgctgcccacagcgctctgcttactcccatcctgcctatctctgcacttcagcgggaactcataagacacccacctgctcctgcccagcactttatgtattcatgcacaggatggaagacctccaacaaagcagcattgttgatttcttagtgttctcctcaccccagagcacatgcccaagtcccttccaaaccgtaaggactcttggaaaataaacaaatgaaccaacccc

SEQ ID NO: 43 - DNA, 192 bp, Homo sapiens
aattactgggttaaaattactgacctatcatcactctgcagagaagccacgtgatacctgaagacattctgtttaccagaagtttccagtggagaaactttttcagaagtctcctattgcaattgacaagtcttgttgttctataatgtcattgaatttgtaaactattaaagtaatgctctttttcattcc

SEQ ID NO: 44 - DNA, 153 bp, Homo sapiens
aaaatgaaggatggaagcaaaaatggagatggaacgaatgagaaaaaatagcataagaacaccaggtcatcgaggcgaaagcagtgatattatctgggaaactggaagaaatccaattgtggataaagataaattacagatgaaaccagtgct

SEQ ID NO: 45 - DNA, 175 bp, Homo sapiens
ggcaaagatgaaaccacaagagaaagcagaaagcagaaagaaggacaactgctatagactggatgttggtgtgccttcaaaattatgttgaagcctcatcaccagtgtgatgacatttggatgtggggcctttgggaggtgaatggtgatgagagtaaagcccgtatgaatgaac

SEQ ID NO: 46 - DNA, 278 bp, Homo sapiens
  misc_feature (1)...(278): n = A,T,C or G
gntgatgtanacagtaacaccaccaccaccactgnanccactccattccatctactatctagaaagagcagttctcnaatgggaaatgatgaggtctcatgatgttgtccaggttggagtgcagtgggctattcacaggcacgatcatagtgcactgcggactcaaactcctcggctcanggaatcctntngccttagcctcctgagtagctgagactaccaaggctgagaaaattatttcaagctaggctggnaaacacacntgtaaatagtatgaa

SEQ ID NO: 47 - DNA, 240 bp, Homo sapiens
  misc_feature (1)...(240): n = A,T,C or G
accagagtgaaagacaaatgngtattacttgggtggcttatgaacagcaaggaaaaactgactggcaaccgccatggaaagggtgtgaaaccgtaaccacgaggactctcacatttacatgttactgactagcgaatgtctaggcctaaaacatctgccctcttatagctgntttattattatgtaaacatggctacaagatttctgacataaaatagtagatgactcagtgtcttcaaa

SEQ ID NO: 48 - DNA, 306 bp, Homo sapiens
gtgtcctcttgatggtggcggcccacactcctgaccagagccaatgaagaagagggcagagcagaggggagaggggctcaggagtaaggctgcaggaagcaaaggaagtgtcaactcaagagccacaaacaacatcagctgtgcacctggcaaagagcctgtgaatccttcagaattgctattactaaaggcatccttacagtcaagtctttgaacaatttttcagatttatgtcatatgaaaccatgggacagacataaaccaaattgtaaaaaataagtaaatgaacaacaaaggctttaagag

SEQ ID NO: 49 - DNA, 265 bp, Homo sapiens
gtggggtctttcaggatgaagtcatgggagctgaacgaattggcctgaatcccaagaggggagtgttcagggcgcgcgtgtccctcggagaggctgaggtaacgctggctccttcccgggagtccctgaacgcccggctttggaatctgcagacagctcttctagcagggcgttggcacctactgactaaccgtgcaatcactcagcagctgtgatggttggtgacatgtctttcacagcccaagatagcctccctagactgagc

SEQ ID NO: 50 - DNA, 243 bp, Homo sapiens
  misc_feature (1)...(243): n = A,T,C or G
tggggagctcctgctttgncaaaactcnnagacgtnantcaanatgcaagaggaccatttcccacatggttatgcctccaacaaatcagcagcaagcacacgttgcctaaccgcccaaacccctccccacaaaccaccttggaaaaatcccggccctcaaattctctgggagactaatctgactgacaataaaactctggtctcctgttcagctgcctttgtgcaaattaaagagtttattgc

SEQ ID NO: 51 - DNA, 181 bp, Homo sapiens
gtgcaacccccagcccaggaggagacttgactcgcctgaggtcagctggagccaggaacacctttgtgcaacagctgccgtggcccatctgtgagagacacgtggaccccgtgcctcgaaacaggtcctgggagtggtgtaggcaccatgatcccctcagaagattcagggaaaaaaaaaa

SEQ ID NO: 52 - DNA, 332 bp, Homo sapiens
  misc_feature (1)...(332): n = A,T,C or G
gcccctacaaatgcatggactttgactctngccagacaggaccaagtttgtcaccatctggcaatcatcgtgaggccggaaggggagactctcctcagagcacttggtatgatgtccctgtgaagaactttgtcagctgggctggcgaagtggtgtgatttccagtgtagactccacacctgaggtcctcaagcccagaaggccctttgaggtctcactaaagaggggctagcagcaacatgggggagtccttgggagctccacgaatcagaatcctggttctattatttatgaaggataattattaaagtaaattcctctgtctttaggtc

SEQ ID NO: 53 - DNA, 461 bp, Homo sapiens
tgattccataaatggtcattataaaagaaactgcagaaatgaaaaaagctgtccatcataattaaaggccaggttggcactgatcacaatctacgtgtacttcaggatgaatacatgaccaacaatcttgtctggctctcctcctgtggattatttgattgaatgactttcaaagcctgtctttgttttgtgttgctataaaggaatatctaagactgggtaataacttacaaaggaaaaaagggtttatttggctcacaatactcatgtctggaaaagttgaagactgggcatctggtgacggcctcaggctgctcccactcatggtgaaaagcaaagtggagtgtcatgtgcaagagatcacatggtaggaggggaagcaagagaaagattggggacgtgcccaggtctttttaacaaccagttctcaaaggacccagcttgacgagaactccttaccc

SEQ ID NO: 54 - DNA, 218 bp, Homo sapiens
ataaggaggatcgtttgagaccagcctgggcaacaagagtgacacccatctcagaaaaaatttcaaaactactcggccatggtggatgatgcagcagaaggccttgcatcagagggccttcttgtgaatgcttgtaagccatcttataccagatgcaggcctcttgaccttggactccccagcctccaaaactaataaatgtcttttctgtataaatt

SEQ ID NO: 55 - DNA, 633 bp, Homo sapiens
  misc_feature (1)...(633): n = A,T,C or G
ccaaactgaaacncctcaanaccagtttctgttatattaacaccttggtgccggcaatggatatcagttcgagaactaaccccaggggcaaaaggactgacatntgaaagcagcggtatataactggtggctntaagaatgagtnttattacgccctctgaagtctagagcccactgaaccctgaagggagtaagacngacgaatggaactgaaaggctcatggcntattcacatacttccgctgcttntctttgtgcaagtngccgaagacatgccacagntgctcgncgnagtaacaaatgggaactacataagtgaacctgtaaatcataacaatgttaggcgatntctctttaaaaagctgtaattctttaatcttatttgcccaatgaatatatatatacatacatacatatatatggtttgctttgntttttttttttaaaananagatttnncntttttncccaaactggacccanaggggngatttnaaatnacttggnanctccgccttttggttttaaaanaattttttgccccgggcncccaanangcngggattacagggggntgccnccccacncgggggaaaaatttggntntttaanaagggggnggggttttccccc

SEQ ID NO: 56 - DNA, 650 bp, Homo sapiens
  misc_feature (1)...(650): n = A,T,C or G
ggaccaggctaaaggaacagacaccactttcagacgtgggttctcaaggagagttggagctcaagtggggacaaggcccttgcttgccacatcacgtaaaaatcttacgtgtctttaatgcacttcacgtccaggaacctcagcttcaaagaaaaccaaacgctcatgcttcatttaattccccttattcggtcttccaaagaggtggagaatagctggtgctcactgtcccagacactgagatggcatttcaagattttctctgcaatctggtctctgaacagacttgagcctttgtctgctggttcccaaccctggttacacatcagaaccatgtgctccaggacctcacctcttggagtctgaggttgagcccaggaaactctatgtctccatatttccatccagacaccctctctcttcatgaaacccttgtaaatgtcttactcattctttagacatggcttaaacctcagctcctccaagaagtcttncaagattcaccagatgaaatgtatggccatttcttctacattccccacagaacccnggtttgaactttacaggcttaaacttatttctatgactcgctncactatgcattnccgcttctatattcctaacacctggccagaaaagggctaaaaatt

SEQ ID NO: 57 - DNA, 196 bp, Homo sapiens
gtgtttttcaacgaagtgctaaatttttcctggctgattccaagaggaaaccttcaggtcatatgtgagtctccccaccactagaactcttaagtggctgctgttatggaaggtcaggctcataatcaccgcatattaagtccttaacagcaatgtctggctcttcattaatctgtaaacttactgatttaccgag

SEQ ID NO: 58 - DNA, 415 bp, Homo sapiens
ctgggattcccgcaactgccagtggtccatggtaccctcatccgcccacaccctcaaggatccagtgtcccacttgcggcagccctgtggctttgcctgcacagctgagacctcgaaacccagctatgtggctccacaccagacctacctttcttccctctgtggcctggactttccagagaacacaagcaacaagaagatcacaaccctaaggagggttgcaactgagaaggtggcccttcctgcagctgccaggctgttatctgcacagagcattgcagcgtgagccacctcagagatggcagggccagagcctaaaaaagcagcattggcacagccgcagggatggatttgaggagccctggaatactcccccaaaaatgccgcagttagaatacacagcgtatccaccagt

SEQ ID NO: 59 - DNA, 177 bp, Homo sapiens
gttttatgtgcatttctcttcacccaactagaagacagaagaaaaacagctacacaggcttactgttctctctcgagcacttgcaacaactgtttggaatggcaacatagatgcattgagtaataaagtcacaacttgctgccaatcattttgggctaaataaagctaacattccag

SEQ ID NO: 60 - DNA, 372 bp, Homo sapiens
  misc_feature (1)...(372): n = A,T,C or G
aaaaaacgttgttttaggagtcggcatggtaacagggccaattcttttagagccaccaagcttctccctgcagtcatcctgcccatggctgttgatggccctgatggggcttggagcccccanaatgtgcagaanttggacaaaggtggtcttcaaatgcaatggttgtnttatnaccgaaagcccacggnatccagaggaggccctttnctncgaagtttacagagagcacaggtctctgtacgtcccaagtttcccctgctgccaaatgcaggggaggagagaattctggaagcccaccctgtcccatggctcccctggcacatggagccactgaatgtcttgtgaacattaaacaaatgcttccaagtg

SEQ ID NO: 61 - DNA, 120 bp, Homo sapiens
ggcctcctctcccctgcccgcaatgccatgcgagctgaccttggacctgcgacccttgccttcatctgtgccgagacctacacaaacagtgatgaagcatcgcagccggaggtgggagag

SEQ ID NO: 62 - DNA, 299 bp, Homo sapiens
  misc_feature (1)...(299): n = A,T,C or G
cttctgttaagctacaatgnnttnaaannttngtgnctttntttaccgcccaantnaaangnttttttttgcatgatcaagcctttcctgatgcccttggtgagaggggagctcccctcccctcagctctggccacagtgtatccggatggccactgtcccactgcagcacgtgggcttgttagctgtgatggctcctggagggctgaggccacgttcaatgctgtgtctaattcagctttgtatccccaacatctcacgcagtacataaaacagaataaacacttttgtttataaatg

SEQ ID NO: 63 - DNA, 358 bp, Homo sapiens
  misc_feature (1)...(358): n = A,T,C or G
caaancngnaatngaaaaggnnnngtccngccnttgggganatcttntaaaattcagtgaannaaangacgaanctaccattaattttaccatccagactgcaccaaaatgttaacaatactgtnttctctcctattaataaacctgtacttatattttataaaattgggagcatatttcatacttttataacttgtgtttttcatgtatatcatgaacattttccaagattgttaaatactctgaaaacatgatttttaatagtaatattaaatatttgnnatattccttttgatagtccactatttatcctacatgatctataacataagtataaataaaaacattttaccttcat

SEQ ID NO: 64 - DNA, 195 bp, Homo sapiens
acatggtgcccttaagcagtgcgcagcctgtataattacacaaaggaaggctggaaaaccagaatgttaaaagcccaagaagaagagtagctccaaagatccaggaagcagagcaccatcaccaggataaatgaatttcaactatattgaatcactgcattgttccattcaagatataaattccagagagaaagc

SEQ ID NO: 65 - DNA, 323 bp, Homo sapiens
aaattccagggactaatattgagatgaaccaggcatgagaccaagctgcaaaattccagaaatgacctccaggttgttagtctacaacccagccatcgtcaagataacattagactgcgttccaggtggaccatgactcaagatagccaccagaccaaggcacggacacctagcacccagcaccactcctgcatgccccccactctaagttcccctttataaacacctctccacagtcgaaagtttgaaatcgtcttttaagggcatgagcttggccattcccagatcttggcatttgaataaagtagctctctgttcatcac

SEQ ID NO: 66 - DNA, 175 bp, Homo sapiens
gaatgagagggagaagaaagaaagggagcctagacagccgagataagccaagaggagggaagtggagaaaggaacactctctcagtatgtcaggcatttggtacagaatcagagtcccaaatgggcacatttgcttggccaagcttaagtcacaggcttttctaactgccaaagg

SEQ ID NO: 67 - DNA, 243 bp, Homo sapiens
cctgacttcccagacacctgaagtgtggggccacactgtcaagtcgccccttgtcaccatgactgggatgtatatcacagatctgcttcatcgcagcacagtctggaaggaagcctgggattccagggctgggagagacctcgagagacagtcaagctcatcacttcaactgcaggcagagaaatgcaaatataagagctgattcctaaggtttcttcaatgaataaaattatacaaatgtct

SEQ ID NO: 68 - DNA, 179 bp, Homo sapiens
ctggaatgttaagttgagaatttttcagcatctccctgtctgccagatcctatctgagatgcctacgctaagaagccaacacagagacacgcaatgcacactatcagcaggagtggcttggaaattctgacttgtattgattgagacaccttcccacgaagaaagatgggattagtaat

SEQ ID NO: 69 - DNA, 160 bp, Homo sapiens
  misc_feature (1)...(160): n = A,T,C or G
ggcagcaaacaagagctctgaaaggggaaggaagccaggagaaagccagctccattagtcacgcagcagcatatcctgtcacaaaggaccccagttgagtaatcgcccaaaatatgcctgttatttttttctgtcagaaaaaaaanggggcctgccaaaa

SEQ ID NO: 70 - DNA, 585 bp, Homo sapiens
  misc_feature (1)...(585): n = A,T,C or G
ctttcaacaaatgacacctctcctctgcttcaacttcttcaagactttccacacagtgggagccccagagtgtgagtataagctgtgtttatcttgcaggttcaagcaaatcctactgtggtggggcagaggaccttgagaaattgaagttcttggaaaataactcatcttcaacctaagggattagggcacctgagcttcgtctgaaaagattgagcctgctggattgatcagcaatttccacatcagcaggaaatgtgctgaccttactttttctaagcatttgcagaaaactggtgaagaaaaaaaagggggnntnntttncnttnatnncccnnttcaaatttttnaanannacnaagggngaatnganagttgggggttncaaaaccaaaggnnttgccaaactgggnttgggggaaatttttgcagncaaacccaaaagcctggnaaggcctaaaaaatttagcgnggngcccncccnnngancggcaacntnaaanaanggccttngttccttncccccccccngnnccgtttaaaaaaaacccgnggggttttnaanngtttnnttgccccccaaaa

SEQ ID NO: 71 - DNA, 630 bp, Homo sapiens
accaagagagttctctgccatgaaaagaaaatctgaggtgaagctgaagttgacaaagttcaatctgaacttaagaccaaggacacacaacatgagcacttactttgacagttctgacatttcttcatcataaattctcttcctatcagacaattcatccggcaaatatcgaaatattaattcttcggccagaacagttatgttaaagtttctgcttgccaataactgtaacaaaaaaaagtcaaatgatactgtatggtaattgattctaaaggacgaagcttccgagtggaaaggtgaacaaggaggtggtgggtgggatctctgagcaggtaagaaggaaaagggatggagagagaggcgggccagcctgtaacaagagcaggggcagcccctccactgtgagaaaaggccaggaggaggcgttcacctggatgaaggatgaggcaactcaatcttgacagcatctacattttcaaccaagtgccatgatgttggtgagaggggaggaagtgaagtagggcatgttgggagaggagagacttttgcaatgatcagcttggaaagtgaagactggactactaaaagaaagaatgtaagaatgattacttatgttttgagtctaaactt

SEQ ID NO: 72 - DNA, 424 bp, Homo sapiens
  misc_feature (1)...(424): n = A,T,C or G
gatatggacaggagacggaaatactgggtagaaaagggcagttccctggcaaagcctcaccctcaagcctggatacctgctgtcttaaacgaaaacgaaaacaggcatttctgtgttcatgctccaaaagttatcttttggcctgccacaccccctatnctgccccatatgaatcccgaaccccatacttcaaaagccgaccaacnagcccccanaccaacanaaggntngcngaaccatntngcaaanaaaggganaagaggaggaacatttgaatnccnaaatgagttcanctnggggcngtcaganaggagtccanccnctgggcngccngaattcaagggaggatcancttttcctttattccctttcttttgcttcccantcattctngttgaaggcccttcnccncttcattaaaact

SEQ ID NO: 73 - DNA, 410 bp, Homo sapiens
gagtaagaagcaaagacgggtgtgggcatgtgactagagggtcctgaggagcagaagatgagttgcatgtgctacgatcgcctgtttgacttgcaaagcacatggctctcactaacatcagtagaatctgaatccatggaacagatctttgtcaattactattgttattagttttcctttttatctgatagttcagattctgtaccctcttcaggtttccagaagatttcttttcctgtaaatcttgatgagaggcaaaacttgcttcccactgtagaagtggaaggctcatttcccagtctcccttgcagttggggttcagaatatgactgagctcttcctggcagatgcacccttctagtagtgcaaagaagctgtgaggaggaggaacattgctggaggttggcggc

SEQ ID NO: 74 - DNA, 337 bp, Homo sapiens
acaatgagccctgaatcctgctacatcagagagaacaagatctttgcttcattccctgtggtaattacgaggttagaaagaactcaccagcgaaaatttctggacctgatgcctttataaacggtggcaagtgctgctgcatttcatggcctcagatcaaaatacaacctcattagctgctgtgaacacaatgttcctgttgaagaatagaatggaatggagttaagagtgtagaaggtctgatgcaaatttactcctactcctattgacaaagagtttgaactactgaatttgtatatgaaagtcagggcatcctattgttttcagttgtcataag

SEQ ID NO: 75 - DNA, 150 bp, Homo sapiens
  misc_feature (1)...(150): n = A,T,C or G
gacgtctggggagctcctgcattaagtcagaactgagtgttttttaagcaaaaaagaaaaaaggaaaaaaggggaggaatgaaagagacagagccggccactacctcatctagcaaatagaagcctacagacacttannganggncaccc

SEQ ID NO: 76 - DNA, 320 bp, Homo sapiens
gaaatcgaatgcctgtcttgaattcatgtgaagcacagaggtgccagatctacagtataatgaagaactaaggctgcaaatgcgggaattgaaagaaccatctttaaggaaaggatcaccactccaagatttaacaaaaatataaaaacaccttccgtgttgcttagtctcaaagaaagcctgcaaatatggatactgaataagctttctcaaggattcttctaaatccagtcccatctctgtgggacgctcatccctgttggccatttccatctgaatcactcctcctcctgagtttaataaagcacacgccgggcccg

SEQ ID NO: 77 - DNA, 338 bp, Homo sapiens
ggttctttgagaggaaggtggaggggagccatcctaaaatttgcagcagagcctggtctctaacacagcctcagactgtggatgaagcagatgacctgctcagctttccttccaacattgctgtttgagcgcatacagccctttccttgttttgaagacgctagccagctcagccagagatgctctttgccaagtctgcagtcttgggattagagtatgcactttaacaaatcttccttcttgagcagaatgtagttggcttgcttcaccaccattctttcctacctccaaaggctgccaggcctgctaaatagtgattaaacaaagattaaaattcc

SEQ ID NO: 78 - DNA, 396 bp, Homo sapiens
  misc_feature (1)...(396): n = A,T,C or G
tcggaattaaatcattgatcccagaagaaagggaccaccacagtgctacggaaaacaggaattgtgagaagttatgggatccattttagcttgatttactcacagactccttaagcacacttcataagatgaggaaactgagacactggaagaggaagtaacttgcccaatgtcactcagccaggaagaggtggaacccagcattgaaatccagacagtctaactccaaaacaaataaacaataccaccacacttttatcttctaggctatacatttctaatggccaatgaagaaaacnaactgaaaacaaaattccttctttctgntcttgnttattnctaaagggtggncttttagctcatggtngaaaattaaagtagtaacatggtttcagt

SEQ ID NO: 79 - DNA, 83 bp, Homo sapiens
atcttcactgaggtggaggagcagtgcagtggccaagagaaagatgggattgacagagggaaataaaaagaactctgatatgt

SEQ ID NO: 80 - DNA, 314 bp, Homo sapiens
  misc_feature (1)...(314): n = A,T,C or G
gtcatttacaacaggaattaaggacaccgaaaaaaaatctaaagaaactgagaggtggaactgaaaatacagaagcagatttgtggtttggaagggagctagncctcatgaaaaacagcaacctggcaaacactattttggaataccgtcattttcaaaatatacatatattttttaagcataaaactgcatttgaagtggaaattaacgtatttgtttttagcacctcagctaagtatttaggatgcaaaaaaaaaatntaaatttttntggaaaaagaatcattcaaataaaaaccattaaaggggaaaact

SEQ ID NO: 81 - DNA, 382 bp, Homo sapiens
  misc_feature (1)...(382): n = A,T,C or G
ggacgggggcacgagaaattctagccagaaaagtgtgggtcactgacaaaccgccactctcaagccaaaaaacctgaaaccacaggccaaagtgagagcttatatacctgttttcccacttgaatgctgctttttcctcaaccacccctggccccgccctgcgccatcctgtgcctattaaaaccccagactcagctagtacatgggactatggctggacgtggganaaaagcagcttgacttcagaaggacagcttaacagcgtaacttcggagaagaatctggctggagatgacctgacttnaggggaaggnaatcttcctacccccttcgatttacaaggtccctttccactgngaggcccttttattttgccataaaa

SEQ ID NO: 82 - DNA, 347 bp, Homo sapiens
  misc_feature (1)...(347): n = A,T,C or G
gtggatgaagttgggtgcttcctgtacattgattttgcttccttctggctcaccaagaaaatcaagaccaaaaaagtgactgaaacccaattacttggggaacagatgaagaggatcccaagcaatggttgagtctcctccatggctccagaactcacaggatagcccctttctcgctggtccatggctcctgctctgattttagtatctggttcctgggatcaaataacatcatctcctccctccatccctccaggactaagggtagcaatgatttattcttctttgcagtctctgagtcacatcagntcccttgcttgctttctcaacttttctattatctatgg

SEQ ID NO: 83 - DNA, 260 bp, Homo sapiens
acagagaaacggaggcacagagaaggaagcggcagttaaagctgcgaagaacctaacaaatttcaagactgtaagtgccttttcccaggatgccagcaagtactgagcctgtattttgagctgcatcaaaccctgttggaataaaaaaggacatttctaggagatcagtcttcaagattggccccagtttccccagagtaggaagaggcaggaagccagagcacatgttctctccagaaataaagttgttgcagtggcct

SEQ ID NO: 84 - DNA, 169 bp, Homo sapiens
  misc_feature (1)...(169): n = A,T,C or G
atnctgcaaggngtgngtgnncttcccanccatggattacaggnaaaaacttgactgcatgtgatcctttgtagttaataacatgatgattgtgttttcacactctcgtgtgagatatgcctccctcaaatcttggcacattacccatctgacattaaaaaaaaacaac

SEQ ID NO: 85 - DNA, 238 bp, Homo sapiens
cgctgcataattgtaccatgagccacgatcctaagtcaagagacctttctctcaccagtgcagatgattgctccctccaggtgtgtaggagggaggatggcatggctttcatcaaaccgtgagctttttcagaacttccaacccaccataaagctcatctgaagaatgtttgcttttccctgtcaaatatttctctgatccaaagtctgttaacaatttaaacgtcaaatccccctct

SEQ ID NO: 86 - DNA, 634 bp, Homo sapiens
  misc_feature (1)...(634): n = A,T,C or G
agtgacatgcttgaggaagagtgatgaataatactgaggatgattcaacgtctcttggttttacttctgcaccacccaaacagaaaataattagacaagaacatttctttttctatatcagtgtcataacatgtattattacagtgcggtgtaaccacatgtcagaagagaatgtgtagctcaaaacaccgaactaggtggagaggccgaggccttaattctccaagagactgggacctgtgctgggttctagcgcctgttcagcgtcagaatcatcagctggctgtgagcctacgtgaatttttctccactcaatctcatcatccttcagacaggcggagagagcgggatccatctatgagatttctctgctgagaaatctcctccctccctccaatgaagcaacagcaggtcatatctgaatgcagaagcatggccttgtgctgggaaaacacatcctggctgtagagctctcaggcttctagagtcaaagccaagggttcaaatcctctctgncttactcagaagccacatggtcctgagacagtgaaagtaactctgtgaacctcagtttaccaatctgtaagatggggatcataatgtaaaaagatggcattaaaacttacattgggaa

SEQ ID NO: 87 - DNA, 180 bp, Homo sapiens
  misc_feature (1)...(180): n = A,T,C or G
caggccttgcctcatcaaggtcagagcagggcttcagggggnttaccntggatangacttcttnnantngtgnggnncntgnctaccttttgagcaagttcagcctggttaagtccaagctgaattggccaattcttttgcnntttaccctggaagaaatactcataagccacctctgtt

SEQ ID NO: 88 - DNA, 386 bp, Homo sapiens
  misc_feature (1)...(386): n = A,T,C or G
gcagtcttagtggtgctaacaatcaagtggcttgccttgttctgacctgagtgttcgccaaacactccccaggctacaacagncgcgctcccctctgaaatcaggacacaagaattgaaagaaactggaacagatacatcacttacccctggcatccagaaccccagagcatccttcccacaaattggttataacaaattaccacaaactcagtggcttaaaagagcaccaattaggggtctagcatccaaaatatataaagagctcttttttcatacatatccatactatataaagatctctcacaacaacaaaaagataaccagcccaattttttaaaaaaggtcaaaaaatggaaatttcctcaataaagatatatagtcaac

SEQ ID NO: 89 - DNA, 595 bp, Homo sapiens
  misc_feature (1)...(595): n = A,T,C or G
ggaaacagaagactttaaaaaaagaaaggaagaaagaaaaagaaaccaccaactctgcaaagttctctggaatctgagaagtcaagcagggcttctgccttgttcatggtgagcctaaactgtgatttcgtctctagacatgacacatcaggcatgcctggatctggtttttctgccaagccttctgacagtaacgcaggcatttgctagtgtatatggaggaaggctgacttgaagtccccagtacatttcacccagtgagaagaggacaacactgactccagaaagccttttgctgacctgctctttgaaaccagtgtgcctgccaggaatcctcgccctgtgccccgcctacactcatccccacctaccttgtccactctgccgccacagcttcagtcaggtcctcatccctttcttcacttcattaccactaaagaaagcctcctcctgggtccccatgctccagtctggctcccttccgatgcatctcccctgcagctgtcagtcattgntctaaaatgcaaatctgaccatgccactctgcttaaaactcttcaatgactatgctaacattaaagatgaagcagattcc

SEQ ID NO: 90 - DNA, 159 bp, Homo sapiens
gctgtgaagagctcctgggttgctgaacaaatggagttgctgcaaggatgccatgcctggagagggcctggaagccctgtgccacacccccatgccttgccctatgtacattttcatctgcatcattggcaacatcctttataataaaccagtaaaagt

SEQ ID NO: 91 - DNA, 555 bp, Homo sapiens
gtgctcaattttctactaaggttatgtagtatctttataaacagaaaaagaagtatttttaacctttaggaaattcttttggcttctggattttttccagtattttgaagtgtttcctcagaaaagattcgcagaagtaatattagttcaagagctcataagacattgagagaatgaaataacacccatgtaaaagaacctaatctagtgcctgggacatggcagatgctcaaatgttggatcttaaatggatgaactgtcaagtcatcaaaacagggattcgcttaaagaacatagtgttctgccttctagctaagaagcattcgatccacttaactgaattgtgaaactgcaagataaaggataaagagcgctgaactgggcctccataaaagtgaaccacagatttgctcatgagctgtgtgactttggaccaatcacattctctgggcctgtggcccacaacggatgagtcatgaacatttatctgtatgtctgtcatctccattagaatatgttcatataggattatatgtccgtgaagacgggacctgt

SEQ ID NO: 92 - DNA, 322 bp, Homo sapiens
tttcaggggtaatcttgtgacaaaccaggcatggagagctagctgtgaaattccagagatgatctcaaggtaattagtctacagcccagccactgctgagatgacaccagcacacgctccaggtggaccatgactcaagacggccaccagaacaaggcataccgaccttacactcagcaccatgcccgcatgcctccctctccaagttcctcttttaagcccctctccccagcctaaagtttgaaatgtttcttgtaaggaatgagcctggccatttccccaaccgctggcttttggaataaagtcactttccttttactgc

SEQ ID NO: 93 - DNA, 634 bp, Homo sapiens
  misc_feature (1)...(634): n = A,T,C or G
aaacttggaggctcagaccctggtttaatgtgtccttctcttactcctgagttgcaagcagtaataaaagagggtggttcgtgtacagtactcgatcagcctattccactagatagattggtagtcaaaagtattgaaccactccatgtgtcagtctttgggctgagaaatgcttttcttatacaacacgaaaacagatatcgacagtgtatagcagcattcttattacaagcccaaacggaaaacatcaaaaaaacatggatggcacaaataacaactgcaatttcttgctttaccaagagtcaggaaaccaagaaaatatctttattcacattgcccgcagaatcctctgaaatttagggacctaaaacaagtggcatgtctttttagaagattatggtttaaggtataatttcattcaaagttttgtaacacttagctagtgataagctaggaggaaatttgcattttaaagaagtttcagaatttgaaattttgagctaggaaaatcctcagtatggaggaataatgactgcaacaaatttgaactctgaggaatttcttgacaaatatatactggcatccagattaccttctaatgctttccgtcangtttggnaagaggtgtgagtga

SEQ ID NO: 94 - DNA, 345 bp, Homo sapiens
  misc_feature (1)...(345): n = A,T,C or G
gacaagctgtgaaatgcctagattccagagcaacagactgtgatccattcccaacaacccctccctaccgtctgccaccagttcccttaaagcaggaatcagagctagactgactcaactaagaattgttttggagaacttggaactcaacattccanaaagcaagaagcttgacatagcatcgatgagcccaagtcaactatatgaacaaaacaatgtctcaggaggggcagggtatcacgtcagaagaatcctgagtccttagatgaccttgtagaaaagagccacaaacttactctgggctaccttcatacctctgaactattatgcagagagaaataaatg

SEQ ID NO: 95 - DNA, 256 bp, Homo sapiens
ttcatctggctctccatgaatgtcctgcttttctggaaaaccttcttgctgtataaccaagggccagagtatcactacctccaccagatgttgggggaactgtcttgaaacctatacatttcagatgggcacccagagagtaagacctcacctcgcccctcaagttgcttacaatataatggaaaaaccaacaaataaataattataattcaataaacaagaaaaggtttcttctaataaacacatgaggtctgat

SEQ ID NO: 96 - DNA, 241 bp, Homo sapiens
  misc_feature (1)...(241): n = A,T,C or G
agacactgctagcagtcacctagaggacgctgcatcccagtcctggccatctcctctgggtcgctggcctgtgcgcccaaccacagaaggccgagggctgctgcttcctggggaaggattctgggaatgatgagtacctcttgcttcatgacaataagacaaagaagaattttgggaaactgtgtctggggaaacaaagaaaaaataaaattatcctttagtanaaacagaaaaaaaaggc

SEQ ID NO: 97 - DNA, 262 bp, Homo sapiens
  misc_feature (1)...(262): n = A,T,C or G
gngtttngcnaantccagcctgggaaagctggcagaggatgcaccgtgttttactcacctgagtgnttacaatgctcgtgaggtgcctccctgatagtacagaggaatgaagaaggaataaacagaccttctggataattgcatcagccttccccactattccaatgccatgctaacatttcaagtagtgtcccttttgtcttgccgagaaaaaatcatttcatgatttattacactggattaaaggctatgcacactctgg

SEQ ID NO: 98 - DNA, 155 bp, Homo sapiens
gtgctatccaacatggacgtctaatctttatgtaatttcttggagaagaaacacctatcagttggagagtgtgtaaccactgcagaggaactcctacgctggaatacaagcataggccaaaacctttcttgctcagtaaaactcaatgtagttag

SEQ ID NO: 99 - DNA, 242 bp, Homo sapiens
gccagctacctgaggaagtccaactaccctgaaaccaccatgctatgagggcgcccaaacctgccaggtagaaaggccacgtggagaagcactgaggtaccagacatgtgagaaaagatgtcttggaccttccagcccagccccggcaccaactgaacacagggaccagccaacaccccatggaacagaattgaactagtcaactcatggaatcttaagaaacaataaattgttgttatttt

SEQ ID NO: 100 - DNA, 54 bp, Homo sapiens
gaatggaaactgaaagtggaaatcaggaaaaggtaatggaagaagaaagcactg

SEQ ID NO: 101 - DNA, 270 bp, Homo sapiens
  misc_feature (1)...(270): n = A,T,C or G
gtgaaaactgaggnanagagatggacgtgcaggatagaaggngatnnatcnaaggacacactgctggctntaggccgagttgcagntaaaatgaaganctccngattcctggcctcatccctttctccttttgnatgtgatttacatacaaatntatatagaaaaccaaganaagttttattttaaaagnactatccttactatgtgtgacaaactaacattttctattgttcttttatgaattactagtcacaactcattaaatccatt

SEQ ID NO: 102 - DNA, 287 bp, Homo sapiens
  misc_feature (1)...(287): n = A,T,C or G
gcanancacagnatggtgacactgncctgcttcatgaacacagnaaatgttgctgagagatcatggcattttctctcctgctgagactaagctgggcttctaaaccttaagagaacactccaggaaacttcatctaattgggtttactgtcttggaatcagatgattattaaaatgcttccaattgtatgtagtatatatgatgtagtatactacatggttgtgcattatagttaattacatacacacatattttggctgtcaaaagattataaattcctatagact

SEQ ID NO: 103 - DNA, 535 bp, Homo sapiens
tttttcataaaggaaagcagcatgctgtatagatgagagaagacatccaaaggaagaagatgcaagccgaaaaaaattcaagcctcccatggcgctttcagaacataccgcagatctcatgtggcacagcccccagcctgctttaaaagagcccatagaagagaaatcagttgctgcttgttgtgtctgggagaataactaatctcaggactcttgttcaggtgtcctcttgatggtggcggcccacactcctgaccagagccaatgaagaagagggcagagcagaggggagaggggctcaggagtaaggctgcaggaagcaaaggaagtgtcaactcaagagccacaaacaacatcagctgtgcacctggcaaagagcctgtgaatccttcagaattgctattactaaaggcatccttacagtcaagtctttgaacaatttttcagatttatgtcatatgaaaccatgggacagacataaaccaaattgtaaaaaataagtaaataaaacaacaaaggctttaagagattttgc

SEQ ID NO: 104 - DNA, 381 bp, Homo sapiens
  misc_feature (1)...(381): n = A,T,C or G
ttcctaggcccagatgtccaccctccttcacgagctnagaattgagctcgtatcgccaacatgttttgcggaaatgctcatatcaacacttggtgaaccaggaagactgtaccctcattcctttntcctgctgcctgctaggttgngttagaaagcttactctcgagttttactggcttgcttgtgctttttggcattttcaaaattttgtacaatgatcttcaaaaagcaaaaatacattaatttttttaaaggtaggatccatatganatnggatcttcatcttctaacactttggagaacagaaaagtggtatttggagatataatcttcataagaattgnggcncctaataaaagagccctggaagaggaaagaaac

SEQ ID NO: 105 - DNA, 177 bp, Homo sapiens
  misc_feature (1)...(177): n = A,T,C or G
cagaaactgaggtacacagaagaaaggccatgtgaggacacagcgagaagcaagtatctgcaagtcaanaanaaagggcttaaaanaaccccacccttgccgcaactttgntctttgctttctgggccttccagaaactggtggaaaagaagtaaaaattctggttggtttaagccc

SEQ ID NO: 106 - DNA, 245 bp, Homo sapiens
  misc_feature (1)...(245): n = A,T,C or G
ggggagctcctgcattaagncaaaactnacaaaggttggggnnaaacnctccactcctgctttcataccatttgaagttcagaccagtgagatttccatcagttgggagtngaagatgccacaaggacaagaactgaggatggtttgctcagagctgatttttagacaccattttccagggatccctggngacagaggagcatttttnttgtggttgagttctgaattaaaaagtgtcgtactat

SEQ ID NO: 107 - DNA, 195 bp, Homo sapiens
gaatttgccgcaccccagggattggacccaggtcacaaccaaggaagctgcacaagatctgaagtgttagccatctcctctcaaccaaatgcatgtgctgagtcctcatatgctggggttcttgcaaataacttccatgtagaataaaatgcttattaaagggtcagtaataaaatgtgctgttttgaagcgtac

SEQ ID NO: 108 - DNA, 160 bp, Homo sapiens
gaaagaaaaataaacatagtcatcagcactatgaaggattccaggaagtttgacatcagagaatttctcaactctaaaatgctggaaacccctgccctcacgctggaggccgttttgatgtccccttgttacttttgagtaaatggaaacatcttttcac

SEQ ID NO: 109 - DNA, 155 bp, Homo sapiens
gaagctcttgtttgaccttctgaaaaaaatcttgaagtatctatgagaacagctattatatgaagcagagattataatagatatggagtttaagttgcagaagaagaagactgaattattaaatgggacatcagaaaataaaagtctttcctttt

SEQ ID NO: 110 - DNA, 346 bp, Homo sapiens
atttcagaggaagttgtctaagatggtgccaggtcaccagaggtgccaatgcaggacacaggcaatgccgtcaaggttgtatccggtgaggatgaccacaagcaagccaggctcatagcctaaaggatacacctgaacgtgttcgctgtgaggaatgggccagaggattatgtgatgtttcatattttttccttgggactttcagatttttccaagttttctgccctgagatgcattactgaacttctgtttttcctcttactacactgtgaagtaaatgtgtgtgatgagtcactggcctttgccaggctgtgatcttcccaagaatgaagtccctatttaattc

SEQ ID NO: 111 - DNA, 275 bp, Homo sapiens
gtgatgtgacccagcctgtggcttccactgccatccacacacgtcgctgcctctctccacatcagcatcgcaactatctcctggaagctttccaagtgctgaactacagtaacctcagccgaactgctgttcattcaccccacaggcttgcccctcctctgcatctttgtgagaacctgagagtcatcctaaactcctccttccacctcactccccacatcaaatcgattaccaacttgtgctgattttatcttcaaatactctccagaattgtc

SEQ ID NO: 112 - DNA, 205 bp, Homo sapiens
gaggagaaaagagaaaggaaccctcccattcatccttccgtatcactactcagaaccaagtacctctgcttctaaactacatcagggagtgcaactcccatggaatcacaggacaagaagaaatgggaacagatatttaagttaaatgatggcaaagaaatttggaaaaggtaaaaagtcagagaaagagaaaacaatggtggac

SEQ ID NO: 113 - DNA, 487 bp, Homo sapiens
  misc_feature (1)...(487): n = A,T,C or G
gcaggtcagctgggaaaaggcgaagggatcctgagacaatggtggattgctccgaacaggagcagcctgttcgggccgagctccggttccctccgagagcggtttgcaaatttctcctaatgtgggagactggtgcaccaggccaagtggcccccactgccccttctcaaggcactgtgaaaccaaatggaatttgccacgaaagtggctcccgggggccttgagaagggatcagctgaggaagctgcaaagctggtaacaggagggcacaggccgtgggtggcgaacaagcaactgcttgtctctgcagagtgatgccggctcaaaatcgaaccactggggcttcaaaaataaaccaacgctgcctgaaaacacaacttgcagaaaaagaattgttcttgaaatttctattgtgaacttttagggnaccaaacttttgaaaaatccaagtttttntgcantttggccaancaagggggcatgaccg

SEQ ID NO: 114 - DNA, 251 bp, Homo sapiens
actgagggatgtcaagcaggtccccagaagaaaagagatggcatgcaatgtaaagaagacggctggagctgaatcagccatctttgactatggtgttgctctgagaatgggatttgcacaaggctaagtaacatcatagaagtagcccaggtgcctgaggacttcaaacacccaagcctccactacagcctcaatttccttccttacattgtttatgtgagaaagcaataaacttctattttggttaatgc

SEQ ID NO: 115 - DNA, 139 bp, Homo sapiens
  misc_feature (1)...(139): n = A,T,C or G
gngaggncacagcaatcctccngaggatgcagnngcaagacaccatcttggaagcagagcagccctgaccagacaccagatnggncagnccattgatcttagacttnccagccttnagaactatgaaaaataaattgtt

SEQ ID NO: 116 - DNA, 489 bp, Homo sapiens
tagacgactggtctttgctggcccaaactctcaaccttgccaagacaacaatggcagatgtttccatattggagaggcagctggggaaggggatggaaggcaagaagaaatgatagataaattggtctatagtcaagtaaattgccactgtagagacaagagatacaacttgtaacacagctggcctggactgacagaagattcagtaacaatataaaatagcaggaatgatggagctgtaactttgtgtgattcctcaacatctacctggaataatcaaccatcttcaggattgcaagccccaccactcctgtgttgctttataatcaaaatgacacacttgggcagtttctccaactgcctgataaattcagttttcaaatactaaggtactatatggcatggtgactttaccattactccagggtgggaagtgactttccactgtttgcggattaccaaagggaataaagcatatttgacagtccc

SEQ ID NO: 117 - DNA, 614 bp, Homo sapiens
gataaagaaagttcctctgagattaagactgagaaaggtcttaaaagccaagactccaaatggcatcaggaaacccaggctcttcgaaatatgcagtgaaaaatgaaacccttgcaagatgagacatttgataaagaagaaaacatcaaattttcttgaagctttcctctcactgtaactctgcctccttggattgaagctacagagaagaatgcagcctgcgggtgctcatgcctgagcatcatctcctcttttccacctgctgagctatgtctaaatagacatcctctacctttggcccaaaactttctgttcctgaatagaaagaacattcttgtcatatcaagagttctgggatattctgggagcagtttagagctttcaatcagtataaagtttcttttctcatgaaaagatcttgccacaggggatgagaaacaagctattgagcatctaatatatgtgtataccatgctaatcaattgtcatacttcaagtctatttaattaacagaaacaccctccaaggaagtcttatcccccctcaattaagtagattaaaaataaaccgtcttgggagaagataaggtgactgagcttataagaagagcccat

SEQ ID NO: 118 - DNA, 134 bp, Homo sapiens
gtagagaaatggagccacagatcaaggtcacccagtgagtgagaagcaaagtctggagctgaggcaagtttttcaaattcctcatccaaggctttctcttggaaagcccaaagcttattaaatccttaaagggc

SEQ ID NO: 119 - DNA, 181 bp, Homo sapiens
caaaatgacatgaatgactgaaaaagcatgtggagcacaagactcaagaactaagtgaaaggactcacacttcctgatttcaagtaaagctacagcaatcgagacgtggcattgatgtaagaatagacacatcaatgaatgaaacagaatacatcttccagaaataaattcacacaaatat

SEQ ID NO: 120 - DNA, 182 bp, Homo sapiens
gcttttccaaaatgtgaggcatatggaaaattcaggcaacaccctgttacttactcatcacttaagccatgttttggctcagaagataccaagcaaagctgaatattactgtatttcagaaaggggagtatttcttcagtgctcatcttgggggtcttcataaaaaatgattgacagctgac

SEQ ID NO: 121 - DNA, 424 bp, Homo sapiens
gtgtaatttctcagaataattttactctctgatgaaaggagggaataaggtaacgagatgttccctccctcccttctcacattggaccttgtgtgaggacgggacactggagctgctgtggccacctggaccaagagaatcaaggaggagctgacccaaaccctgatgctgcaaagccattggccagcgctggcattgtccgcctctggagtccttgttacaagagaattataaactcctgttgttgagactttgagaccccatggcggagacggagggtccttccactgcagcacaaagtggggcacttgcagtcacatcgcctgtgttcacggtggagcggatctactgcccttgtagggctgatgcattgcaaggggctgaacctcctgcactgtctcctcttggtgtatggagaaggaca

SEQ ID NO: 122 - DNA, 197 bp, Homo sapiens
  misc_feature (1)...(197): n = A,T,C or G
tgcggaaatgctctatatcaacacttggcgaaccacggaagacnngcnccctaattccttttctcctgctgtctgctaggttgagttagaaagcttactcttcgagatactactcggctcgctatntgnttnttgccattnttcaaaatttnggtacanattgattcttcaataaaagctnnaacatacaattaaat

SEQ ID NO: 123 - DNA, 146 bp, Homo sapiens
  misc_feature (1)...(146): n = A,T,C or G
atgacaactggagtctggaagtacagggaaggagaaaagcccagcgcatttctgaaaaggggaaggagcatggccctgcagctttntctagatcctggttctncagcatgganggaaaaacatctcatccaatcaaaatgcaagcc

SEQ ID NO: 124 - DNA, 229 bp, Homo sapiens
  misc_feature (1)...(229): n = A,T,C or G
gaaacgacnangccnaatagaaaattttctaaacccccatgaagctagaaaacatggattagtatgagatgagaaaaccaaggctaagagaggacaggagtatctcttctctacacaaagccacttgagcccatttgaaatgtaacttttgccatggaagaattctaccaacacntttgtcgtcatttaaactacccactaaataccttttctattttttatactattt

SEQ ID NO: 125 - DNA, 500 bp, Homo sapiens
  misc_feature (1)...(500): n = A,T,C or G
ngcggtgctccaggtgtgaatggagacgacttcgagctcactgtgctgagaaactgcttttcagagggcttctacagagcccacagctcatcttctagaagtcatctatagctactgtcagtttctaggcttccaaggacacccttcagcctactgcaatgcagcttcttaccctactcctccatggacagatgacatccatttctgaaatccaggggccacacttcaatctatctcatgaggtatctctgcttggtggacaccgatgttctcccttcctgaagactctgcttctctgacttctgtgagcatagcctcttctggtcactcgttctctggcatagacttcttctctgtgggctggtagcgaacagtggggccttcagcatcattattgctcaggtcagtacaaaggaccacataagggagtatgatagtgaggagccaagatcactccatatctcgagaagagatgatagcagcctggaatggtttggtgc

SEQ ID NO: 126 - DNA, 167 bp, Homo sapiens
  misc_feature (1)...(167): n = A,T,C or G
actgaggtggatgcgnccatcttggaagccatgttaaagaaggcagagccacaagatagatgcagccgggttctctaaatcaccactggggagaaacccacacaccaatgaggaatacccattttttggattttaagagcaagaaataaacttcaattgtgttcagc

SEQ ID NO: 127 - DNA, 63 bp, Homo sapiens
accttcgggcaaggaccttcacaagggatgcagtacatgctgttgaagaagaaaaaaaaaaat

SEQ ID NO: 128 - DNA, 340 bp, Homo sapiens
cccaagctgttggccaaggagcttcttgaccttgtggcttctcacttcaatctgaaggaaaaggagtactttggaatagcattcacagatgaaacgggacacttaaactggcttcagctagatcgaagagtattggaacatgacttccctaaaaagtcaggacccgtggttttatacttttgtgtcagaggggatgccacttgaatctcgtgaaacctgggtagtttatcccaaataggagtggtcgaaacccagcagcaaaccacaggcccatctgcatttcctgccaagggaggatacagcttaataacatttcagaaacaataggcatttttctgtc

SEQ ID NO: 129 - DNA, 594 bp, Homo sapiens
ggaaacagaagactttaaaaaaagaaaggaagaaagaaaaagaaaccaccaactctgcaaagttctctggaatctgagaagtcaagcagggcttctgccttgttcatggtgagcctaaactgtgatttcgtctctagacatgacacatcaggcatgcctggatctggtttttctgccaagccttctgacagtaacgcaggcatttgctagtgtatatggaggaaggctgacttgaagtccccagtacatttcacccagtgagaagaggacaacactgactccagaaagccttttgctgacctgctctttgaaaccagtgtgcctgccaggaatcctcgccctgtgccccgcctacactcatccccacctaccttgtccactctgccgcacagcttcagtcaggtcctcatccctttcttcacttcattaccactaaagaaagcctcctcctgggtccccatgctccagtctggctcccttccgatgcatctcccctgcagctgtcagtcattggtctaaaatgcaaatctgaccatgccactctgcttaaaactcttcaatgactatgctaacattaaagatgaagcagattcc

SEQ ID NO: 130 - DNA, 152 bp, Homo sapiens
gctcataggtggaaggacttgccttgagtctcagaagagactttggacttttgagtgatgctggaatgaggtttgtcaaagatcagcattcttatacaccaacaacagacagagagccaaatcatgagtgaactcccattcacagttgcttc

SEQ ID NO: 131 - DNA, 265 bp, Homo sapiens
cttccaaagttaaatgagatgccagtcacaattcaggatgccagaggctggcagacttctccaagatggaaaaatgaacatttatcaagcacctgctttgtacacagatgcttactcaggcaaatgcgtcacagtgaagcactcacagacatgtacagtcctccaggaaggtctttccttaccttgaacaaattcagatccttgccgttccaactgtttccgtagcttctcatttgttttaatagattcttctaaacgctttctc

SEQ ID NO: 132 - DNA, 374 bp, Homo sapiens
ttgatagcaatgtagaaacagatatttagaactggagaagcactgctagtctggtacatgactgagatggaacagaacaagaaaattatacaaagcagtcagaagaacctgaagaataaaatcagctggagctactcgtctcagggaaagcggccttggctccctcgccccgagctgccctaggaagcacgttggactgagaggaggcagcaccttgacctcctgtgcatgctcagggccctgcatcagagccttccttccctccactctttcttccctttttctggctttcttctctttctcatcctataaagaaagtaaggtaacttactaaattacatacaatcaaataaagtttaaaacatagccaggag

SEQ ID NO: 133 - DNA, 496 bp, Homo sapiens
  misc_feature (1)...(496): n = A,T,C or G
atgagaaaacaggctgggcaaggngaaatgacaacaaaaccgtactgtaacaaagctgcctaacccacctgcaaatctacaattgagaaatccatttctgttgcccctgagatttgtggggtgtttgttaagtagcaaaagctgactgatacaagattcaaactcaagtttctttgattctgtctgcatcaccatgctgtctcactgaacttacagccctgattcctgttcctgattcccaagtgtcctgtcctaaaaggagcagagataaatattgnattcatccattttctgatgttataacagaatcccacactgttggtgttctgagtatactgacattccttgacgctagattttatattggtgattgcttggttatcatctctctcctctatgagantagaggattttctctttattcactttattcatttatatccataccacctggatcaggttctggcacataataaatgctcaatggataaaaaag

SEQ ID NO: 134 - DNA, 197 bp, Homo sapiens
atggagaaactgagacgcaggaggattaagcacttcccgaggtcacaacagtgaatgttggagctgggatgtgaacctgagcagtctggctgaagagtctgctgtattcaccacacagacgctctacttttctgacatccctcttagagccacaaagatgccattccttgccctcaggaatgctcaaggttcccccc

SEQ ID NO: 135 - DNA, 209 bp, Homo sapiens
  misc_feature (1)...(209): n = A,T,C or G
gaaacaaaatcttcagacttgcttccaaaggagaagtttgaaatggaagggagaaagagaggaagggagggacggcaagaaggaaagaagagagganggaagaaagcaatggcatgcccatgtttctgtgttgttttttcctactacaaaatattaagatattggataataaaggagccaaatagtgtcacatggctcacgtgtgtatc

SEQ ID NO: 136 - DNA, 135 bp, Homo sapiens
gcttatctccctttgtgtttcttggagattaacctgatgttactctgagaaggctctgtatgttgccaagttttgaactctactgaacggaaccaaaaataaaagtctaagaccaaagttgcaaaaaaaaaaagg

SEQ ID NO: 137 - DNA, 461 bp, Homo sapiens
  misc_feature (1)...(461): n = A,T,C or G
gtctcagtttgcttcatctctggaatggagatggtttcctatgtgatcatgaaaatttctcccagctctgaagaccttttattttgtaagaatcattgtgaaggtatgggcttggcaaatgaatggaaagatgagcaatgggagaggaaagaattgaagggggctgtgaggtttgaagaatggcatcccccatgaagtggcgctgaaagatcacgatagcacagttccgtgatgtgaaataccacaagtctgcaatttttcggtcttgagagtgtcgctgggctgagaggatggaaatctttcagtaattataccagtttgtattcgtctcacatttgggaccaaatacaaatccgatccactctttctccctgtgaatattcataaaaaaccnaagtgccaatttctggtctaatcatgtatggaaccaaatatgttnatgaagcctaagtatatactgg

SEQ ID NO: 138 - DNA, 279 bp, Homo sapiens
  misc_feature (1)...(279): n = A,T,C or G
gcattaagctagaacntgaggaaagagacangctntggcctgaactcaaaacttagaagacatgagacacagagagggaatgaaagccacagagagagaaaatgaatctcaagaggaggacaggactgtaataagcgacatcatgaagttagaatcttccagcagaagactgaaatactgtaactgacagtaactgaccatctggaacactataaatgtcttctttacttcttactttgtttatttgtttgcttgcttgctttaaaaaaaaaaagtaaa

SEQ ID NO: 139 - DNA, 249 bp, Homo sapiens
  misc_feature (1)...(249): n = A,T,C or G
gngatgacctcaagaggactcctgaattaatgtctgtacagtaacttctcagagtctggttaccagtttcctcagctcttccggcacatggaccatgatggctgcccccagatggtgccttcagctccccagtcaccatcactgtggtatatgctgttggtatctcaccccgatgcctttactgggctgatgtccttatcttgcagctgctgtgggtgtcagttaataacagctcatatgtgtaccctt

SEQ ID NO: 140 - DNA, 593 bp, Homo sapiens
  misc_feature (1)...(593): n = A,T,C or G
gtgtttttcaacgaagtgctaaatttttcctggctgattccaagaggaaaccttcaggtacatatgtgagtctccccaccactagaactcttaagtggctgctgttatggaaggtcaggctcataatcactgcatattaagtccttaacagcaatgtctggctcttcattaatctgtaaacttactgatttaccgagagatgtctttgtttttctcggcgttttttcatctacttctcaccctggtgccaacgcaatttccagaaaatgaaacaatgattagtttatgctattgcatattaagtttggttttctctgtatttacattgcatgtttcaaaggttgacttaatcagctgtgagttgttatgcagttagtcagagtggaattcccacagattttttcccccaatgtatcacataacaataagagagctagacacaccttgtgtagttttaacaagtcttcgcagttttacttaatttgnttcccttcccttttacccctgaggctcccaaagcaaatgaaccattcaggagcataaaacaaggggaattagtttagacttcaataaaacacagacctcttgcttgc

SEQ ID NO: 141 - DNA, 206 bp, Homo sapiens
tgaagagaatgggagatgcaacatgaggtcctggagcaggcagactttggaagctgacaaccctgagcttgcctttggggtctgtgagtttgtggagaaagactctccatctctgatcctctggtgtttcctctcctgtaaaaagggaaccgtggtgcctctctcgaaagccaatttcaagcactgaaataaaccaatgggcttag

SEQ ID NO: 142 - DNA, 34 bp, Homo sapiens
tgagccgagattgtgccactgcactccagcctgg

SEQ ID NO: 143 - DNA, 290 bp, Homo sapiens
  misc_feature (1)...(290): n = A,T,C or G
ccggcacacnaacaagctgcttgggagtcaagaggaagacatcggcagaagancacacagcggctggncatcgngaggncattgggaggagcacaccagcagaagaacacaccagcngacnctggnaagtcnacccgcanaacaacggnaagnttggccagggtagttggaggacagnccagccgctgggtggcccaactccaggggaaaaccaccancttnccactncatccccgtnctgtcctccccatccaccttgctgagagctncttccactcaataaaaccttg

SEQ ID NO: 144 - DNA, 189 bp, Homo sapiens
  misc_feature (1)...(189): n = A,T,C or G
tgatgaagaatgattttatacaatgaaagaaacaagtcattgttttcttcatccatggcaatattctccctgtctttcaagaaagattgaaaangtctttcagattgtagtaatttgaaaagttgtaaaagattgtaaaatagaggcatatttatcagatttgggggaataaattttttttgaaaaagc

SEQ ID NO: 145 - DNA, 570 bp, Homo sapiens
  misc_feature (1)...(570): n = A,T,C or G
tgaagggtcaaagccaattnnagaaattttttcaagggctttgtaaaaaaaaagtgggaatttttgggaaacccaaggtctttcngccttnagggggggaagcatcttgttgggaaggttccttaaggttnatttgggatccctcanttccaanagaagggggccctggctccaatacccccagaaagggaaaggggaaaatgcttgccaccaggaggnagggccccaaataaaggaaattcttaaggaacangggggcttgggcttcaagtatttccccccgggcccctngtngaagccaattttagaattcaaccccccctttttttngntcccaaaatcaacctttttttnttaccaccaagcctgggtccccattaccttttcaaaaacccctnggattcaatttaaaaaaantggggggccaggcggggccttcttgggaattctttttggggggtcctttcaattttcttggnaaangtcctccccaattgngtnancaantaacaaaaccttctttggaatcaaaaaaaaaaccaatttnggggaatnggccctttttccctt

SEQ ID NO: 146 - DNA, 770 bp, Homo sapiens
  misc_feature (1)...(770): n = A,T,C or G
tcctgtggaacaggttngcacacacagggaaatctcaaccatttatgaaataaacctgcaagcagggattggaccacccggggatcctctttntctccctcccaaatgccttgcaggtgggatatcttggggactaccattatgccagtgggggaaggaagcttgggaaggggaagcctggtttaccaaaaccctcaagcccatttaagccatcccccaagctcttgttcttttttggaggaaaaggaatggacctggaagnaaggggaaaagggtggggtattttggaggaaaaaaaccaaaaaagccattcccaagcccttttgtngaaaaggcctggaagccccttnaaaggggtccccccttcttcccaagcccccttgggcttggaccccccaggaaccccttcngtttttcttttcttcttgggcattnccaaactttccaaangggaatttggggccctngnttttccccctttttnaaccttaattaggcctaacccaacttcnangctttcaactttcgccttggaaaagaaaagggcaaggaagccccaancggccctttccttgggggnaccaaggttttccccttttcnggctttacccttaaaaggggcaaaggncggaaatnggaagttctttttttttcaattcggnaaaatgggaggctnggnaatttttnccccttcacnttatngggnaacaaaaccaagggggggcctttaaancaaaanttttaaattaaaaaatantggcctccaaccg

SEQ ID NO: 147 - DNA, 449 bp, Homo sapiens
gaacaaagattgattctctggcacacaggtttcagacaagcaactgttggattagagcatacagggacatatattgtcctactgccccctgtggttagtacgatttgtctgactagctagttattaatagttgtccccttctcctaccacttcaagcccacttcaaccagctccttccaaatgctcaagagaagacttcagaagaaattcaaagttttcaaaatgatgttggattgaaagttctgatgatgttctataaaccaagagtttgcaaactgtggccaaatcctgctcaccctctgattgtgtatagccccaagctaagaatggtttttacattttaaagtagctggaaaatatcaaaagaagagtaataatatttttgtgacacatgaaaattcatgaaaattcaaacttcagtgtcccgtaaataaagcttactgaaacag

SEQ ID NO: 148 - DNA, 256 bp, Homo sapiens
gaaagtagtagatcatccaaaaaggcgatttggtatccccatggatcggattggtagaaaccggctttcaaattccagaggctaattgactccaattatgcaacttccttgggtgaaatgtcacagcaatatggaagatgcttcactgaagttattcacacttcttaatgattaaacttttaaggaactgaccttctgcaaatcctttccaaagcttgaacttcagtccatcacattacagcattgttacagcttc

SEQ ID NO: 149 - DNA, 393 bp, Homo sapiens
ggaatctcatcaaacaaccagggaggatcaaccaccagagaaaagaagagactgggagtcatcaccatgtccccaacagaattttcatctatccttctgaggacagttccaagtgattacctagaggactttgcttcataataagtcaaccttcattcctgtgcagccccacctctcaccttcccaaaatgtctgcctcccatcttctgggtccattcattctctcaaatgatttgctgcccctcaaaagaattttccacgttcctcatctctcccctcccctgggaaaaagcatatataagcttctataccaccctgggttattgggtaatcattctccagcaattctcccatcctgtgcacatcaaataaattctgtatgcgttttctttt

SEQ ID NO: 150 - DNA, 488 bp, Homo sapiens
  misc_feature (1)...(488): n = A,T,C or G
aaattagttgataacgtcttccaggagacctacggccatcctactgatatgaaccagatcatacctgccctgatgggatgccagagaaagactgctgcaaggtacgcgccactcacagacctctccatttatctcactgatgcaaaggaccctgagtagggatcctctggaaacagaacagagggaagaagataccttccctgaagcccagatgttccagaagcctgcgcctcattcacaaagtcaccccaaaaatgccctagagtttggagttttgaagaagcgggaagaaggcctgagtaagggcctgggaaccaagttagatcctacttcagcatcagcacatgccagcgatggtgcacacaggtggagagcggcctgcccgtcttttccatggngcccacagacccatttaggatgaaagancanaaaatttttttccntgtaccggntntggaaccaggggaaatttatatttggggcccttg

SEQ ID NO: 151 - DNA, 443 bp, Homo sapiens
  misc_feature (1)...(443): n = A,T,C or G
atcctattgtctccatcaaaggaaaataagcaaactgaagtgctagcccaccagctctgtccagtcccaacaagcaagggccttcctctgatgtcagagacctcaggttgcaagaaatgcgaagggattcgaaggggcatgctacaacctaaatggaattcctttaaaaagcactgtgcagcagaaaagacaagtatagtggctatttaatcatcttcactatgaagtgccaattctttagagtcttatgacattcatgaatgatgcaggaggcggacatgatgaatgcagagcaattccctgcgacagatactttcagggaatttatgccccctcccccaagaacaaaagggctcctgggctcagttatcatttgttctgcgagagaatttacagtcttttcagcaacttcntttaccctactcataaagcgcttattttga

SEQ ID NO: 152 - DNA, 290 bp, Homo sapiens
  misc_feature (1)...(290): n = A,T,C or G
atttgcgaagagtgggaaagtgagcattgagcatactggaaataccaaacgcagacgccctgggatgagggtccgcttggcgagcccagcaagagcaataaggcctgagtggtggaagtggggtatgcaagaacgtatcattcttgttgcttttacctgctgcttaataacacgcatgtactgtctggcaggaaataaagagattacgtttcaaaaaaaaaagggccagngnggccanttcagttngnanttanccaggntgaacttgntnaaangggggggactaccca

SEQ ID NO: 153 - DNA, 508 bp, Homo sapiens
  misc_feature (1)...(508): n = A,T,C or G
ggtacctggcacaagtttctctggattaaggcatagaatggtgtggatgatatgccaaaaatctaggaactctctctcctccagctggaaagaagaagcatttattacctcacagtttctatgactaaagaatccgggagtggcttagctgggtgacctggatcacggtctctcaggacgctgcaatcaagatgttggctgaggccatggtcatctcaaggctcagtttggggaggatccacttctaatcaaaatcacaaggaaacctgatggcatggtacctagtttccccaagagcaagcaatccaagaggatgagacaaagaatttaagactgaagccacagtcttttatcatttcatcctgttagagttatcctatcagttttgaagtctcantggttttagaaccagtcagtaagtcacccacactcatatgagggataccaaggtataatgccggagcagattgtgaagcctctggagctgcttccatggctgtatgatctg

SEQ ID NO: 154 - DNA, 81 bp, Homo sapiens
  misc_feature (1)...(81): n = A,T,C or G
agacgctggggagctcntgaataaaaaaanaactgngtnatgggacgcatngacccanaaagcagacctgggcccacaact

SEQ ID NO: 155 - DNA, 416 bp, Homo sapiens
gacgtttgaggctcctggcaatgaggatcttcctacaatgggtgcaacaaattcctgggccttccagaggttctggatgcaaattaagttgcttctcagcttcccccactgctggctgatggttgagatttcctgcatcttccagaagcaaaatatgctgaaattcaagaactgggcatgaatgactgtgtcactcgccagagctgagccacctccaagcagtgagccaggccaatcatgtgaggccctgccaccttcagacagtgtcctgtcccccttcaccaggaacaaacagaggacggcctgtcgcctctcagctccctgcctgcctcagactttcacatactctttatcaagttttacagagcttttctgactctgtaacaaacagtcaaataaaaatgctggtgttcccc

SEQ ID NO: 156 - DNA, 403 bp, Homo sapiens
cacattggatcaaataatatcagaagctctcccatctgtgatctgtctatagccttaccattagaagcctcaccagagccaggcagctgcagaagcctcttttaaaaatggtttagaatgatgactggacttggcagcaacttgctttggaagcaccaaacaaaaagtgctatctggtggttgatttgattaactgcaatctagacatccattttgtggaccgtattcacataagcaagcagctgcaatccaggcctctgtttggggttgctgagctgagccaagacattcactcttcaacaacaaaggcatgttgggagcagccaggagcagttctggcgcttgggagtgaaggaatgttctgcctaatgagtgccagatgaaataaaatctttgatatatt

SEQ ID NO: 157 - DNA, 104 bp, Homo sapiens
  misc_feature (1)...(104): n = A,T,C or G
gngcacattnanganccaaagncatgactgactccccgnatttcacacctcantnttaaagngganaantatctgaactaaaagctgaactcaacaatgaaaag

SEQ ID NO: 158 - DNA, 636 bp, Homo sapiens
  misc_feature (1)...(636): n = A,T,C or G
gctgcggggcaccagctaaactctctgggaagtttgcaggaggcacagatacagccttaaccttgacgagtcttccatcagagacatttcaagatgcagtatgaaaactaaaaggctctgctctaacagaactttctgcccagccataacacaaagatatcaagaagaaaataacaaaatactgtcataagaaaatgtaacacaaataaagatacagtactccaaagtaccgaggatgccaattataacttaccaatataacttcaggataaactctgacatctcctttgtgcaggagctgctattaacatcaccaggaagctggagaccccctctccattgagcaagatgcaaatgtttaggggaaaggtgagaaaggaggatgtctctgcaggaacccaagtcaccatgctgtggtgtggtcaaaccagtgactctcaccatgtaggcagccagtggctgggggatggctgctgctggtgtgatgacccctcctcataaatttaaacttaaaagaccatctttgatggtcacaagctgtgtgatctctgctcaccaccttgttctgatcatttcccaagtgagaaccacgaataatatttcactnctatgatctttatatncaccaccaaggat

SEQ ID NO: 159 - DNA, 383 bp, Homo sapiens
  misc_feature (1)...(383): n = A,T,C or G
aggaactcaatttttattcagcactgactacttggcaagcatcattaaatgctgtatctcaatggattctctcattatagctgtccatactgnggaggtttacaggaaaattctacaaatgccaacaactggtcaaatatagctggatacattatctgcatgttttctggtcctacacaaatggcctataaaagcaaaataagaacattagaatgcataatctgaactccattaagttctttactgtgtatatatttgtttaaccacagaatcttaaaaactgtcttattttatgtattataccatcttttctgagccctaaaggacacaaactattttaaactgttatagaataaagtataggctgaaactgttaatcagct

SEQ ID NO: 160 - DNA, 162 bp, Homo sapiens
atgcaacgccaggagcagcatcagccacgctgtaaacaagggggaaacgccaagcgcattacagaggacgtcagccctgccatcactgggctggggaaacaatgccagctatggctggtctccgggttcacagtgataagggaaataaacccttatttgtct

SEQ ID NO: 161 - DNA, 276 bp, Homo sapiens
  misc_feature (1)...(276): n = A,T,C or G
caggcncacaaacaagcngctgggagtcaagaggaagacatcggcagaanaacacacagcggctggncatcgngaggacattgngaggagcncaccagcagaagaacacaccagcngacactggnaagtcnacccgnanaacaacggnaagnttggncagggtagttggaggacagnccagccgntgggtggcccaactncaggggaaaaccaccancttncnacttcatccccgttctgtcctccccatccaccttgctgngagctacttccact

SEQ ID NO: 162 - DNA, 284 bp, Homo sapiens
gtaccctacaaacatcatcagcccatcagctgtgtgccacaggaaggctgggaagcacggggtgtacagaaaacaagcaaggaagagaaaaggcactgaagcagaactggtgaatcaacagtgcctgttaaattggcaaatcctgaaacactcaacaagaaccttggctccagaggggacaacacaggtcataaaacttccagggccactgacctcattatgtgactacaaaggtttatcatttagtccaaaattgtggattaaaaataaattaaatgccatgt

SEQ ID NO: 163 - DNA, 209 bp, Homo sapiens
ataatgcaagttctgaagttctgaatgaaaaaaattaagtgatatttactattctacagcgacttgttgaggtgctaaggaaagccatgcgatgccacgcctggcaacaaacccacactgcttcaacttcctgtgaagaaagccctaccatgatccccacccacattatttattttgacgacccaaacaaataagaaaatgtagccagg

SEQ ID NO: 164 - DNA, 184 bp, Homo sapiens
cacttggcgctgctgacgtacagagcaagcaaagccgctgaagttcaaaacctgcactgaatctatctcaaacaaagaatgccaggacccactgcagtgacccctaggatgaagacatggaatctgttattatgcaatgtcacttaagtatgtcttttatattaataaaaaagttcgtcttggt

SEQ ID NO: 165 - DNA, 341 bp, Homo sapiens
  misc_feature (1)...(341): n = A,T,C or G
gaaagaacatcaaggctcagggtggtgggactctacttccataagagcaatgatccattgggtgaccagcacggattgtcccacagcccccgatggaaacattcagaggtgaatgccttgctcagagccccctggccaggctgaggagggaaaaattctgctttccaactctggcaagaaattgctgcatccagaggctgcagaagcccacgaggagcatgaagatgcgtgggaagaataggcgctgccttgagtgacatcctgagccagacccttacacacacagctttcattgttggcttttgtgtttttttttttttttaangnaaaaaaaaaatccc

SEQ ID NO: 166 - DNA, 419 bp, Homo sapiens
  misc_feature (1)...(419): n = A,T,C or G
agtcctgcattaagtcgactgaggtggataatgaagtgaaaggaagcagaagagagtgttatagttggaaaggtgggaaatcaccccctccatgctgaagggaagatttcaggttccaaatgacacgtttccctcagaatgacttttgctgtagtgaccatggatatctttgctgtgttcctgaaactctgcagacagtcctaagggatccagtgggtcctctgatggaccccaatgctggaagtcacgcatatagctctgaagagttgtcacaagaaatggcgtttctggaggatgcacaggaaacttttcatttggcatgaaaaaggctattggatttgcaaagactgcagaggaagaagtttaaattcttgagccccctaaaaaaaaatttttaaaaaagnggcttccaacctttg

SEQ ID NO: 167 - DNA, 177 bp, Homo sapiens
agaactgagctgacatggacagaacttccagcaggaccttgaatgttaacgcattacagatgccagaacctctgtctacctaaggccctcagtgactttgtgaagcagagtctcacctccaggctggaaacatcctggactattacatgaacaagaaataaacttcactgtgctgct

SEQ ID NO: 168 - DNA, 439 bp, Homo sapiens
  misc_feature (1)...(439): n = A,T,C or G
gatatgaacacgaagcaggcagaggatgaagctgatggtgtgcatggtcactgtgctcctgcccatttttgagcttctggaatacaagctgtgcctttgcctggaatgtccctcccagtctgactaggcatcttctgatggggtttgacctggttgcttctaacactaggatggacctcttggcaatctctggatatctttctgtggtttgttataatgggagaagaagaagcactcccatctagattgctgtatcagaatggactgttatgattgcaaatggcagaaacctaactcaatgcaactataanaatgagggaaatgtcttggcagctcttgaaatccatggaagaacaaaatgatccaggtgctggagggacagcaacagagctggacctcangtgctgctggagccagaggctcaattttcactagtctt

SEQ ID NO: 169 - DNA, 393 bp, Homo sapiens
  misc_feature (1)...(393): n = A,T,C or G
cttctgncacgtnccgggtcccagagtgtgcctgctcagatcccaaaaaacttgcnggancaggangnggtcacanagtggttaaggggaagggagaacaggaccggcgggtttctttaccgcgggtcaagaacccttgaaagncntcttcggcttcatgtaacgcaaacttggcccacattcacttttccccatgggcggccccaagtccgaacccagatgcctctccgacgacagccgcaaagcgtaaggcaggtcgttattccagcctctaagcgctttacagcgccagatggctcgcgcacgcgctgcgtcttagtataggtccttgttaatagttagaagtgctgttctcattgatataggaaaataaaactacttgtatgtcttatg

SEQ ID NO: 170 - DNA, 227 bp, Homo sapiens
  misc_feature (1)...(227): n = A,T,C or G
caccctgaactagaangggnaangnaangtgccttgngantcacncggccacaacgaaaantagttgaggcncggcgccgggggcttcacgcttcttaatcccagcacttttgggaaggcccgagggtggggaaagaattggctttggaagcccttgaagtttcgaagaacccagcccttgaagccaaggaagtggaagaaacccgcccgttttcaaactagggggg

SEQ ID NO: 171 - DNA, 808 bp, Homo sapiens
  misc_feature (1)...(808): n = A,T,C or G
gaccttctggggggagnctanctggcatttangtncagaacctgcccctttctttttaaaaaagaacaacttcaaagnatctgggcaaccacttgtgccccaaagctttcttcttaagggaaagaagaattggtcaaaagtgttgggtgccctgggacccagcaagcattangccatcaccttggggacccaagttaagaaaatggaagaatgcttcaaggcttccatcccaagaaccttgcttgggggcttggggggcccaaaccaatcttgtgtttttaacaagggcctcccttgtgttgactggtngatacgtggatgcttccaagggtaaattgggcccacttgaaagaaaagtaaaaaggaactgttctacaccttaaaagaaagccaaaggggacctcaaattacaggccattgcggtttacttggcattattatcaattttaaaaaatattcaaaaattaaatggggaaaggggaaataaaaacaccagggcttaaaaaggggatggaatttaaaaaaaaaaaagaagtttaaaaaaaaaaaaaaaaaaaaaaaaagggccangcngggggcccaatttcaanttttnggaantttaacccanggcnttgaaacntttggttcnaaaaaagggggggggggggaacctncccccnannnnnntcatcccncnntcacnatnttnttgnnacnttacttgnntcntctacattcntganctacaacattcatcttatntanttatntatccncntnacncnctnanntttttncacttatttncccanncttatatatatac

SEQ ID NO: 172 - DNA, 649 bp, Homo sapiens
  misc_feature (1)...(649): n = A,T,C or G
tttttaggtacaagaaccttganganttttttggacttggcttggncatngggccggtgccccttcttgggangaaagggcccttngnattggtggaatgggtggtccaacctttccacaaagtaccttcngggccaaaaaggagggggtgaccaaagtttcaaagctcaaaccaaaggtcaagaaacttaaaaggggagcctgcttgaccccgggggagcttgcccaactttcttggnggggaaaaaaggggaccaagaatggaaagcttncttttccaagaaaagcttgatggaagccaaccttgggaccagcaaacaagggggaccaaacggagggtgggacctttcccaaagaagtacttggtggtctttcctggtccttgcatcgcccattgatgttgttaaccgaaattctttttgaaaagggctttcccaagataaagcaagccccaagggaaagaaaaatgaaaaactcctcttgatgttgggtttggggggggggtcttgccaagcttggggggccctcccttgtcgccaagtgggggccacttttttttttttcnncctttgnttcttttaaaaancccnnctttggntgncttnnancaanggtttnaattaaaaanaattttttgggaaaagttttt

SEQ ID NO: 173 - DNA, 271 bp, Homo sapiens
  misc_feature (1)...(271): n = A,T,C or G
tttcccggagtggggatatgaacagcccgtcttgggtcctgngggtggaagccnatgtgtggaagaatggagggcatcggttagaaaggagtctaagtccctgatgggcactgagctgcaagaaccagcctgggctgcttctgctggatgtcacttactagagagcgaaattaaatgtgcttcagctactgttactttgggttttctgtcatttgtagctgaaataatcctaatcaatatgagatatattaagtaaacaaaaatgcaaatg

SEQ ID NO: 174 - DNA, 272 bp, Homo sapiens
  misc_feature (1)...(272): n = A,T,C or G
caggaaactggnagggaaagaaagaactggccaagggggaccaaatctttggttggaaatcttggggccangaaaccccttaanggaggangantcctggaanttggaaancttaatggttatttaataaataaaattggtggtttaatctttcaaatcctgggggccatgggcaccacacaggggaaaccaatttctgggcctggaatggcttgcttcaaaggcttctccctcttttgggaataaaataaaatgggctttcaggttttttc

SEQ ID NO: 175 - DNA, 267 bp, Homo sapiens
gactgagctgcttggcctgcagaggaagcgggaagcagtcagatgcaaggcacccaggttagaattcaaatgctgcaggcaccggggtctgcatgacaggacggctcagtttacgctgtagctgaggaaactgaggcaaagaggacgaggaaagctgcccacaatcaccctgctatggcccaggactgcagttcagatcccaggacttccaggctggtgctttttccaccacggaaaatattaaagactaaataaactacaaacatt

SEQ ID NO: 176 - DNA, 332 bp, Homo sapiens
gcatgagcaccaatgactaaattggggaagaggaactcaaggggagaaggcagctcagaatcaaagattgaagaattgtatctatcttcaagttcactttctctgtcatctctattctgccgttgtgccatcagggtcaagcagcaagaagataaacagagaaaaaaaattaacagttattagccccaccctaatgaagccaaagagttccactgggaaagagcaactgaaagctctgcgtttgaaactctcctggactcagtctcatgtatctcccactttggctgatgacgatctatatcctttaactgtaataaacaaaccataactgt

SEQ ID NO: 177 - DNA, 908 bp, Homo sapiens
  misc_feature (1)...(908): n = A,T,C or G
caggaaactggcagagggggagtctcactcttggtcgcccagggctgggaagtggcangtgggtggtcaataagccangcttcanccaacaancctcttggccttcttcaaaggttcaaaggccggaatttctttccggcaatcaagcccttccaagggcaaaaggaatggaaaacccaccaaaggaagaaaaggccaggaaaggggcaagaaaaggaaaggggaccaaaccttggcttattaaggaacttgggaatggttttgggttggtgccctttcaaaaaaattatgtttgaaagccttcaatcaccaagttgtggatgaccatttgggatgtggggggcccttttgggggaagggtggaaatgggttggatgaagaagtaaaaagccccgtattgaaatggaaaccgaaatccttgttccatgccattggaagatttatgacctttataaaaaagaagtttccttaagaagaggccatcctcatttcttccaccatgtggaaggtttaccaaattggaaaagataagcttgtctatgaaaccaagggaaaacaaggatcctcaccaagaacaccaagatcttgtaagggcacccttggatctttggacctccccaagctttcccacaaacgggtgggaagaaaatttctattgggtttaataaagccaagcccaggttggatgggcaattttaaatattaagcaagctttgggaantaggaacaagggacaaccaaaccttaagcaccaaaaaggttttcttaagggatgccttacttaaaaaggccaccgacntttaatggggaaaggtttaagtngcctcttaaaatggccataatanttaagttaaaaggnaaagnaaaaggaatggtgggaaaaatcaaatgggatcaagaacctccaa

SEQ ID NO: 178 - DNA, 274 bp, Homo sapiens
  misc_feature (1)...(274): n = A,T,C or G
ctgccgcctgccggacacacaanngtcctgtatgggggaagtggaccagggtcntattcaanccccttcccgtttattcggangaatggatggcnttaagtaccangncanccnttnggagggaaactngggcctcngggaaccaaaggtggaaccctngaagaactggggtggggctttcttaagaaaccaagccctttacccaaactggtaccctttcccctttctttggctcaagcccaaataaaattaatattcccttcttttcaacttc

SEQ ID NO: 179 - DNA, 526 bp, Homo sapiens
  misc_feature (1)...(526): n = A,T,C or G
gacgtctggggagctcctgcattaagtcagactgnggggctnctttggtggccngggctggggnccagngacgggntnacagcacacgggcggacctacctacacctcccggctcaagctatgctcctgcctcagccttcccagagttgggaggcgtgggatcaagtcctagattggtcattcctggctgtgtgactctgggcaagatactcagattctctgggccaccggtttcttgcatgttacaaaagcctggttacatttctcatatcaaggagatacaaagttgcttcaaactcctcagccacaggaactgtcttattcatttctgtatccccagcgtcctgacacacagtaggtgctcagtaaacgttgaatggatacaaacatgactgtgaagagccttgtaaacatcattaaccaaaatatgtctatatgtatatatgttagcacttactacaacaggcccataaacctttccaaaatgacatcaacaggaagtaaaacctgttttggatgtacccat

SEQ ID NO: 180 - DNA, 730 bp, Homo sapiens
  misc_feature (1)...(730): n = A,T,C or G
cagcaactcgagnggagacgcaagcnctctcttcgggcnccggnaaaggaatttaaagtttccgtggaaatgccataccgccaaggaacttcggganggtaggtttcccgggtttcccgggcggtgggcccattttttcggtttgggtggggtggttcaagtttggtgggccgggtttggcttgggtcaagtaaaccaagcccaaagaatggcttgcgggaaatcttgctgggctctttccgtcaagattggggccaagaagggaccgaataaagccacttgctttcccgcagggcattttaaaaaaaataaaaggttcccgggaagaaagccaaaaaaaaacttgttcccaaggggagggatggatgaaaaattccacttgtatctaaaagggggtgggggggtaagcttgatgccctccttgtataagaagcccacccattggattcttacaagtttgggtggggaaacaagcatattgccatatattgaagcttgggcttgtgggctttcatttcccaaaggaaagccaagggaagttgacttcaagtcatcccaagccaaatccgcttgggttcaagttttcatttcaagctctcttatggggaccaagtaaatcttgganaaaaataaacccgaagctccttcttttggggggatcaaataatttatttggactttgtaagttaaacttgccacccaaataaaaagccaagtcttttacccatgg

SEQ ID NO: 181 - DNA, 622 bp, Homo sapiens
  misc_feature (1)...(622): n = A,T,C or G
caggaactggcagggcaatttctaaaccgggggaatgaacaattgggcaatcaatccctcaatcaaaccaagtacaatcggcaagaagaatgggtggcgggcaatggcccctgggaacgccccaaccaagcaagtcccaatcccccggcttggtcccttgggaagaatcccccttccaaaggggaagcaaccccaataatggaacggcccgcccaaagggacttccattcccttgcgccagggggccaaggggggcaattgttcacttggcccgaaagaccttgcgctaggggggggactcctcataagccctcaagccctttccctcgtttccaagggcctctccccaagggcttgccaatcaagccttctttacttttttgaagcctcttgatttccaaattcccttgctccttcccactccattaaaagaagggctaagggtggaagggccgctttctaagggtttgcttggggggctcttgcttgggttaaagggaaacaaggggaaagccttggaccaatctccctccactacctcttcccttgtgcttggntacacaagtgggtcatttgtttggatgttaaaattaaaaggtcaataattcttggcttctcttcc

SEQ ID NO: 182 - DNA, 412 bp, Homo sapiens
cacacaggacacggtggggatgcagcatcttggacctcatccgcctgtgctctaattcaaagacaaatatgtttcccaacctgcccaaggctctggcagggaaaactcagatccccaaactcaggtcgttctagtgcagcaataaccagctgggttttcagcaacttggatggagccatctgtgttcccagcccacataaaaatatgcacaagaagggtgcaaatcagcaagtccacagcttccagaggccccagctgggatgtgccctccctttggggactaatgaaagagcccaaggaagtcactgaaagctagatatagcaaaatggtagctcaacaccagatgcaattatttaataataaactctaaatttgtttgcccccttaataaaactctatattccaatattc

SEQ ID NO: 183 - DNA, 899 bp, Homo sapiens
  misc_feature (1)...(899): n = A,T,C or G
tacttcaaggggaccccncctncttgaacatcnaaaagggtnagnggaacgaagatcaccggngacttgaagacnggcggagccggctanaagccggggtacgagcccgtacttgcccgcttcttagaattttcttttgcntcctcttatgggggtaaggaagccgcaagcctctctttcngcccgggaaaaggatttaaagtttccgttgaaatgccattaccgccaaggactcgggagggtaagttcccgggttcccggccgtggccattttcngtttgggtgggtggttcaagtttggtgggccgggttgcttggttcaagtaacaagcccaaagatgcttgccgggaaatcttgcttggccttcttcggtcaaggatttgggggccaaggaagggaccgaataaaagcacttgctttncccgcaaggccatttttaaaaaaaataaaaagtttccgggaggaaagcaaaaaaacttgtttccaaggggaggggattgaatgaaaaaattnccaccttgtantcttnaaaagggggtgggggggtaagccttgaatgccccttcccttgtantaagaagcccaccccatggaatttctttaccaggtttggggnggggaaacaagcaataatgcccattataattgaagccttgggccttnntgggcntttcatttttccccaaagaaagccaagggaagtnggaactttcaaggtcantcccccancccaaatcngccttttggggttcnaagtttttccaatttcnaggcnttnttcttattngggancccaagtnaaattcttgggataaaaaatnaaaaccccgangccttttttntttttgggggggattccaaaannanttttaatttngacctttgtaagttaaacctt

SEQ ID NO: 184 - DNA, 324 bp, Homo sapiens
aagacatatatgatgtctgtctgggatcccagcaaccatcttggaccacgtgaaaaccttggggatggaaatcacatgctatggatggcgaagaaaactaaaagcgcctgagtcactgataccactttagagctaccatataagcctctcttaagccttccttttatgaaagaaatataaaattccatcttgctgaattcctatctgtgttactagcaattgaacaactgatttgccagccatctgaattacccagattgtctgataattggtcaatacccacttcattttaggatatagaaataaagcttcaaaactggccat

SEQ ID NO: 185 - DNA, 176 bp, Homo sapiens
ggtcagcagagacaaaggcaatgttggtgaggccatgtacattttcatctccttgagctggtactgtgagcaagctgttcatctctccacgccaacctcaatcttcctctctaaaaaagggactgatgctactttcctaatcctgccatgacctttgcaaataaaacacttaactg

SEQ ID NO: 186 - DNA, 268 bp, Homo sapiens
gaaactttaatacatcataactattcattaatgtatgcctggcaaagatcaaatgtcagaagatttattcagccacagacactgcaaattaactacattcatgggacaaccaaagcaagaaagcctcatgttttgggggaaagtttgatatcagcaatgtccagacaagcaagtgcataatggaacgcaacttcatggaacccaactcagacaggattgacagttgaagaaccaactctttaattgtgagaaattaaaacaaatctac

SEQ ID NO: 187 - DNA, 221 bp, Homo sapiens
aatctcactctggctgctatatggagagtatactggagaagaacaagaatggaaggagggagccaagttcagaggtgaacaagagctgtgagaagactctgaggccttaggaaatgggaaagctaccggtcaaaaggatcctggcccctgaataactgcacagctctttgctggtctgcactgggatgcgatgtaactgataaataaacatttcttatgtt

SEQ ID NO: 188 - DNA, 540 bp, Homo sapiens
  misc_feature (1)...(540): n = A,T,C or G
agttggatgctgaaacttgcagtcacacaaggacttgaacctagagcttttctaaagcccgtactctttccagtaccctgagccaggggagccagcgggcagaaatgacgtgtgaggtaccctctctctcttcacttccatgtgatctgttactcattttgtcaagacatcctgggtcccagagaccactcttattcccaggtgtgtgacctcctcctacagactacagtgggaaagacaccatctccaggngccaggngctacacaagatactggctatagcagcgaacaggacagccccgctnattctnatnggnggnccaggacaataagaaaaaagacttttttatttttatttttttgaaacggagttttgctnttgtttgcccaagctggaatgcaanggtgtgatctcnatnactggaaccttcggcttccaagttcaacaattattctggctcaagcctnttgagtagctgggattcangcacctgccccactcccgggtaaattttggggntttaanaaaaaaaagggttt

SEQ ID NO: 189 - DNA, 258 bp, Homo sapiens
gcatgtctgcagaaatgatcagacgtatggaattacaagatctcctgctcgtttagggtgttcaaggaaatcaaagaactgtggaaaccattactgtccaggaaacaatgttgtctttgaaagcctcatcacctaagacatgtctctgaagtagatgaaaaagccaacccaggcatagtggtggagcccagatgtctcacatgtttagcatgagctagaagacactgtttaagtaaaaatgactaaagccagcctgcc

SEQ ID NO: 190 - DNA, 334 bp, Homo sapiens
  misc_feature (1)...(334): n = A,T,C or G
gacactggctcataagggatttcaatgtgcacagagcaactgcctcctcacctccctacggattccactacaaccatctaggaggaccacagcagcatcgtctagccttccccttcccccaggaccctgggctggggtggaggaggaggcgccactgcagatccagtatggtgagaggaatctcatggcttccaccagaatccccaaaaccacagcacatcagtttgctagcttgcacaaaagccttcaccggatgctgagcaggtgctgggcctgtgcccttggacttnccacccttcagaccattaagtcnaantaanttcctttcctttat

SEQ ID NO: 191 - DNA, 370 bp, Homo sapiens
  misc_feature (1)...(370): n = A,T,C or G
gagctgagctgggttttacagagttaccgcgaggatttctgttgtgggaaaatacccaggaagtgactgagcccagccagacgtcactgggagacatgcagaagaaaagattttccnttgggagttaccccacaatgagttctgggtctggtcaaatcacccattattcaaacacattgcagccttcctgttntttaggaaatcaaacagaacttcagcagtatgcagngaggccattttaaacagngaaatcaccaacntaanncccaanttttngaaancnnggccttaattnncccncaaaagggaancttgttaccnggnaaaaaactggaancaananggccagnttcccttgttggaccccctg

SEQ ID NO: 192 - DNA, 258 bp, Homo sapiens
ttcagctgtcatgagaaagttgagtgatgagaccttgagcgggaatcatcaatgaaagggccaaggagatgagatggagcattgtaatcaacaaaagtgctaaacaccaagaagtgttgtcccatattttattacacttgagaatgtcttgctattttagacgttacaaggtatggcaagacagtcttgtagcagtgctagaatgattcgttgaaatgcattcaatcagaaataaaagatgctgttaataactgtcac

SEQ ID NO: 193 - DNA, 190 bp, Homo sapiens
gtcctcatgtgcccttgagctgtggactccaacactgctgtttgcaaaaagaagatggcaggaaaggatggccctgcaaagtgtgccatcatgagtgagcatctctgtctactcaaactctgattttttcactgcagccgacttagtgaggaatatgggcgcactaagttataaaatataagaatgacag

SEQ ID NO: 194 - DNA, 353 bp, Homo sapiens
agaactgaggttatttttgcctgctgtttatgtcatgaaccaggagcagcaaaaacatttaatcttgcatgctaactgactgataatcactgatggtagctctatgctaaggattctgagaccaccatgggactggatggaacagcatgctgtgatctgctaatgatgtctgctatggacaccacaagcatacagagtgaacctgcagcacagcaagaaaacagagcaccaggctgtgacttcacagaaggccctgggagttgcagggaagaacagagagtcatggcacatgaggctacaggaaaaatgattttaaaaaaagaatgataattataaagcatttattgagcact

SEQ ID NO: 195 - DNA, 326 bp, Homo sapiens
  misc_feature (1)...(326): n = A,T,C or G
gtctctgcctcctctctgtcaggaaggagagagagaagttaaccacacagaactgaccaccctctttacccagaaggagctgatcagccatctttaggcagaaggcttcctccagctgcacccagattccccttctgtctcccacagcaccctgggcttacttctccagatcatgtaacaccctgtgctaagattgnttatctcttgnctgacttcttgagtggatcataagctctttgaatgcaggcattgngtcttctcactcgcaacatctccagtgttgaggacagaagtgcccacagggcataggatatactcaattaagg

SEQ ID NO: 196 - DNA, 303 bp, Homo sapiens
acaacaagctggtgagcagcctcagcctgcctcctttgttccatcagagatgctcatgtcatcgggttacgcaggacaattttttcagccagcatccaactcagattattattcacaatctccttacattgacagttttgatgaagagcctcctttgctagaagataagttaaggaagtgttattaatgtgtgtacagctagaagaataatagcaataattagcacttaatgtgtgctgtcagcctgcagtatacagtgtcttatgtttgattgtttcacatataacaagagtttgctgaacc

SEQ ID NO: 197 - DNA, 170 bp, Homo sapiens
gtatgacacacacgatgtctaagcaactgccttccagcagtgattgattttgctggttccccacacaaaaagtttggaagagacccttatgtcttctgtagagtttcttggttgtaagcagcaagcactggtgctggctaacttaagcaaataaagaatatatcactcag

SEQ ID NO: 198 - DNA, 342 bp, Homo sapiens
  misc_feature (1)...(342): n = A,T,C or G
tgagatttatagtgctcttggggaggctcctggaagaagtgatatatcangacagacatactattcaaaagcttaanacttagcatctgactataaacaccatgccacaaagaagcttgggatgaaggatcacgaggcgagaggagtccagcgcccagcacacccactgggagctacatgcatganaccccacccaatcagnagaaccatacngccaacagaattatgagaaataagaagntgnngnnggtctaanccactaangctttggaggggnttggttnacatcnataggtntccttgcttggnactacttcaatcatttnatgtttgagagaggcc

SEQ ID NO: 199 - DNA, 280 bp, Homo sapiens
gaccagattaatgaagatcacagctgggaacacctgtgatcacacctgtgaagaccacacctgtgattatgagagaaggaaagaatctccatggaagaagggtttaaggaggatggggctagaggggagagaattctgggctgattcagagtctgtagaagaggaaactccccagctgtggccatgggacagaggagttctcaatgcctcccttctagaactagtactaatatggaagtggcataaacagataacacaacagacataaaatataaacaac

SEQ ID NO: 200 - DNA, 205 bp, Homo sapiens
  misc_feature (1)...(205): n = A,T,C or G
gtcttgtttcagtgagaatgtaaagtacgtgagctatgtgctttgtgatgaagtcgttgatttatttcactttggaacaagcncaccacaacaaagtgagaatgagaaggtnattcagagggagaagaaggaaacggaactgtncgtagaaatatatcctcatatgaacttanacnctgnaatanatntaggttgtcaaaacacc

SEQ ID NO: 201 - DNA, 261 bp, Homo sapiens
tgggaatatgaaacccagctcccttgctgaagatgggacaacaccaaggctgaactcacacttgaattcacccacaggatggggctgagcctgagatctcatccttcatggcttcctctccttccttctgtttcagaggaatctgacctaactcacttgtttagagttacaaacaaaataaatggtgaggtcaggacctaggattgctgtattgagcaaataaaaatacaggactcttgcattttatctagcaataaaaat

SEQ ID NO: 202 - DNA, 124 bp, Homo sapiens
  misc_feature (1)...(124): n = A,T,C or G
cagctcacgctgctgatgcaacacaggtgaagagcaccttcccctcccccacctgngggctgattnccaccacgtggatcccaaggccatcccaggaactctttggaggggagaagcccagtgg

SEQ ID NO: 203 - DNA, 265 bp, Homo sapiens
atgaagaacaaggccatagaaagaaagccacgagctcaaactgaagatggggcgggaattaggattcaaatccaggtctccggatccccaagacagcgtcttttccacaaggccactgcagccatccatcaatttagacatgaacctgttacctatgtggtcacaatcatgccatatacaaactttagccaagtagcacttttttcctcttagtgctttctcactcagaatcaaattaattcctcaataaagttataaatccaac

SEQ ID NO: 204 - DNA, 465 bp, Homo sapiens
  misc_feature (1)...(465): n = A,T,C or G
ccttccttgaagcagcatgacccatctggatgtcctcctcatctcaggaattttctaataagctgtctaaatccagagatccgaccacagaacaatgaatgccaaagatgagttctaaagatgcgagtactttctttctaaacggacgctgctttgtgtatggctctgctcctgggggcagacgcggcaggctaagccctgcggaggaggagcaggagacagggacccagagaagtgaagaggcgttgccttaggntgcacagcagatgacgcctctcaagatggaccctaggttgtctgactccgtctcacagctttgccccatttatcatgaagatgaacgctggtaacactgctacctacgagctgagcttgccgccattcctggggnggacatgcatgcgtgccgcctcacgcaatgtgctnagtgcacaggaagggagaccaaanccccttgagggggtt

SEQ ID NO: 205 - DNA, 181 bp, Homo sapiens
agtgctctccctggttattccagaaacaccagtcgctgaggatctctcacctgcagttccctgctggatcttcattctgactggtcaaccaattgttccagtgcattgaagggctagcatttcatcatcgaattgctttgtacctatgttgaaaataaaatggtgatgtgtatgtggctgt

SEQ ID NO: 206 - DNA, 388 bp, Homo sapiens
gcaaacaagctgagagtttaagtgatttacccttcctgaaagaggaggtcatgaacagaattccaggatttggacctgtacaaatgccattaaggcaatttttcagggacttaacaaatacccacctggtgatgttaaactacctttgaagaaagcagctgttggcccaaattgtggcctacaaagaaccccttggattttaaggataagaaagatttgtatgaggtggactgacttctctcccaggaggcagccatatggaaggcatgtggcccagtgacaacaataactgacatttactgagcgttgacaatgaatgcgcgtaagacttacataatctcattatctctccaatacttaggtgcatgtctaattatcaccattttgc

SEQ ID NO: 207 - DNA, 418 bp, Homo sapiens
  misc_feature (1)...(418): n = A,T,C or G
ttagaaatgcccgntacttaagagtancttgccnnanctacaaagctgngngnttnnaactnanngtgatggccattgatggtttnnntctcctgancncaggatntgcctgcctcagcctnncnnagtgctgggattacaggcatgagccaccgcacccagccaaggattatttaaggatggactccaaatccagtgacaagtttcctcagaagagtgaaagatgtgaagatagaggcagaaattagactaatgaatctccaaaccaaaatataccaaggactgccagcagctagtggagaaacatggaacagattctccttcagagcttccagaaacaatgaacactaccaataccttgatttgagacttagtcttccagaattatgaaagaataaaattactgctgttctaaacc

SEQ ID NO: 208 - DNA, 450 bp, Homo sapiens
gaagaactcccccttggaaaaaccatcagtgccggaagatttcctattgtgttgatccatggcaaaggagactgcagatacacaagggatattatggagcccagacgacctgaataaaacccttccctactacaaggacagctgtcccttccctacacactccctacaggctgatgagagaccttttttggaagcagaaacttatactttatgctgccttcttcctgactgccaggattatactcttcctttccatcccagatctagcaatgctgttgatgaggctaagtcatgatgatttctttaatatcttggaacacagtagatgcctgatatttgctgatggactggagaaaaactgaaagtataaaccacaacatctcaagagatgtcatgaatggagaagcatatggtaaaatataatgaaaattaaatctactttacaagtgg

SEQ ID NO: 209 - DNA, 390 bp, Homo sapiens
ctgaggaaactgagacttggagacttatgtgcaattaccctcaagcaagtggtgaactggattcagtccatgcagatgtctggggtgggatactgagatgctgcgttgctcatgagctcccaggtgatgagaaggggcctggtccatggactacacgtggagcagcagagatgtatcgacttgtccattgaagagacacagaccaggaaattgatctgctgccaccccagaactgtgtcatttatttattctgcccatacgtattgggtgtttctcctgtcccaggcattgtattgagatacagtagaagactagaagacgagacaggcctgctccctgacctggtggactttagacctaaagcaaataaattagactcttacaaagtgc

SEQ ID NO: 210 - DNA, 253 bp, Homo sapiens
gctctgggtgagtgttccagaagctgacgatgatgcaggatcgtctccctcacacacacaaatgccatggcaacagcaactccgtgacaacagcaaagaaagccagactggaatttgccaacccagagtgtcgaccatctgtgaggccaaaccctccaaatgttgcccgttctaagtgctcatctcaaccaggcttttgtacatagcagaggcgacatttaagtgacataagaataaacattgggcacatgtg

SEQ ID NO: 211 - DNA, 247 bp, Homo sapiens
gaatgttctcctgtttgttcagccagatctgggcttagtcttttgcttttctacacggattctaaaatcagcttgagcaagtccatgaagaagcttcctggagatgctgacaggaattactctggatttgtggaactggatagagatggcatctctacagcattgagtctgtgcaccaacggacatggcatttctctcctttgattcagaacttcttatctttcaataaaatttcagaattttctcc

SEQ ID NO: 212 - DNA, 173 bp, Homo sapiens
attcccaggtgaagctcatgctgctgtcttgcagaacagatttgagtcgtaatgctctagaacagaggttctagagtacgaggaatgtaccttctcagctccaacacagacctactggttcagaaactctgtggatgggatccagcaatccattccttattgagacctccagg

SEQ ID NO: 213 - DNA, 382 bp, Homo sapiens
gatggggagtatgttccccaaagctgccttctcaaggagttggtgccttttggggagtcttggatgccccattcgaagactgtggtgggtgaatcaggcggtaccccttcgccaagagcctggggaaatgggccaggccagggaggacggaagaatggctccatctcagaatgcaagtgcatcctctgcccgctccagctcctccatgtgccctgcccagatcctggcacttctcactggagaggactcggcccctgcccagggtcatgcagttatgaaggatgaggctagaaccctttgcacccatctttttcaaattacttcagccaaagtaagcttggtgaataagttgcaattaaaataaaggtgaacaagcctggtg

SEQ ID NO: 214 - DNA, 220 bp, Homo sapiens
gactcaggcttattgctgtttatttgtgggaccctgctcttttgcttggaaaccaagcaaccagactcttcactaaaccaacaccaacagatgaagttagaaggcttgaagctcttcctcagccccaggcctttcttcttcttcttttttttccccccagcatttgtggaatgtaaagttgaccagatgaaccaaaataaatttgtttacctggcttctt

SEQ ID NO: 215 - DNA, 146 bp, Homo sapiens
gtcagcatcacaagacgcatgaaagaggactcatcgccagggcatggagctggtgttttgatcaaaatggaatttgctctcaaatagacatgtattcactaatctcctttcttttaaataagtaaataaaacaaacacaaaatctc

SEQ ID NO: 216 - DNA, 268 bp, Homo sapiens
ctatctgctgcacacgaaggtatacatcaattgaaccgccaacaccctaccccaagaagagtacctggtggaagatccaacagtatctgggagtaatggagttttctcgcatggagttcagaagatgacatttgtttaaagaagaagagtaaagcaagataattatcagggtagaagtggagttgctactacatggccaagaaaagtgtgaatgtgctgcagtgattggttgatcccaagggcaacacactcagccagactgaaaaaa

SEQ ID NO: 217 - DNA, 381 bp, Homo sapiens
ctcacaattggatatactggttattttaccaaggctttaactggaatgatatatttttggatatgaccagactgctttgagcaatttaggttgtcttcacagagcaaataaaaagccccttggaaagactggcttggtgcctcatctacatggctcccttacgaggttcctgatgatcttgtgggtagttcaatacactgaatggttgtataagtgggaaaagtggcatcccccttgtccagtttctataagactaccattgaataaaggcctcaatcaaccatccatacctactgcagattcttctagatgctgatgtatgcggaacccagaatttctattcttggcacccatataagtaaattttatttgttctgcatt

SEQ ID NO: 218 - DNA, 298 bp, Homo sapiens
ggagcccagagggagccatccaatgcccttcatgaagtcacgcatagtcagccttgtactgattctgcaaaagaggaaaaattaaattatgagaagaaactggaacttcccaagaatcctaagtgtgtgtttaacattctgtaacttccatttcatttgtaaattttctgtaacttttccacttcaatatttgcttgaatattggtatttaaccaatagcatgttgaacttcaaccatttcttccctaaacttttatcctttttatatttccttgcatgataaattaaaaataagcag

SEQ ID NO: 219 - DNA, 128 bp, Homo sapiens
ccatcctccaataaattcaagtttttattttggaatgactttccatttaaagaatttcgaggatactacaaagagttccagtatatccttcattcatctctccctaatgggagagaaggattattttg

SEQ ID NO: 220 - DNA, 270 bp, Homo sapiens
gggttacataattagcagaagggaggagcttcaaatcctggcactctaacacagagattgttcacttaagactacacagtaccacttatgaaaaaaaactggcagaaggtgttggtggacaagaacctctcctcttcatggaagtgaacagaccccgcgacgtggccatgagaccatagagtacgagatggaaaagagccacataccactgtgcaagtggtagtttgaactcctgtatgcgtggcttatatacacacactactgagattt

SEQ ID NO: 221 - DNA, 461 bp, Homo sapiens
  misc_feature (1)...(461): n = A,T,C or G
gagctgagctgggttttacagagttaccgcgaggatttctgttgtgggaaaatacccaggaagtgactgagcccagccagacgtcactggagacatgcagaagaaaaggcaagattggttgtgactctcctcttctgggaacattctagaaaggggtagcaaggatgctgaaaccaggccagctccataagacctcactttgcagaaatagagagaagtaaggggtgtaggtaggaagaacagagtggtactgagaagtctcaaggaagagagcgaaggggaagagcagcatagaaagtgtggctgcatttgcgtggtggtcttactgcgtacaatggttgagctccatggtccttgtcagcctccctcacagggggaatgccgcagatctcttgaaaaaaaatagcttcctntttagcctgncccgaaatccccactatttncacaacagggagaatgcc

SEQ ID NO: 222 - DNA, 755 bp, Homo sapiens
  misc_feature (1)...(755): n = A,T,C or G
attcattcctctgaggaccctcaagtacttcagaagaactaaaaaatgaatatcacgttacaccaaagaagaaatgaaagctgccagtgtcttctgaagttaaacaggctcctgttctttgacccagcaatccaatcctagtgccatgtttgtggacatccccccactgcccttcatcctcagaaaggaacagcctcctgtgggttgacttggtgatatctgtccatagataatgtctccaaccccaggctcatcactcagacatctgccctcaggaggacacgttcatccccagcaccagagacatgtctgccaaggcttttggaactgattttatccccatgcaaaaagctagattctaattctgtctgatcacaaaaggttgaatcaaagccctacaactgaggttcatgcaccaaaacaagaaatacatggaaaagttgccaaaggattttagaatatcagaggctgtaattcattatagatgtggatccttttgctttcctctaaggaaaaaaaatattcaattttattaagaaaaaattcccactaactgnggncatgttcaaagcactccagaaaatattttgaacgccacanggtttcgctcaaggaagaaaattcatcattttaagggnggggggaaaaggagctggncattcattttctctcaccttatcctaacanttataagttaaaaanggganggattggcttttgnctaaactccatggacaaaacaattttttgccttt

SEQ ID NO: 223 - DNA, 422 bp, Homo sapiens
  misc_feature (1)...(422): n = A,T,C or G
aaaaattgacagcaggggccatgtctgtttggtttaatgctgtaacattccaagcacacagcaaatgtacctcacgtgattaattctcatgagtaagcagagatcttgacctgtagcttcttacatctgcctatttgtttagcagaacagagaattacggtaaaacagaggcatggtacaagcgtttgtgtttgctttacaaacacgtctcccaacttagtacaaaaaaacactgcaaactcttaattttagatcttcttangtttgttgtaaatagaaagtagagtataatgntttatagatttatttctaaactatattatgggtacttttctcgngcttttcagatatttnagaaattgggtatgngctggcatgaatattggaatccttttttnnttaaanggttaaggaaaaaattt

SEQ ID NO: 224 - DNA, 207 bp, Homo sapiens
agtctgaaatgattccacctggtcttagcagaaagctggcccggaagttgtaatacatgaagatccaacagccaccacgtgaccaagagaaaaaagccaaaagaatcacagacctggccttcacattgtaaaggttcttagccagggccaatagttgccgctctctgaacttcttatcgtatgagaaaaataatcatttacttgttc

SEQ ID NO: 225 - DNA, 382 bp, Homo sapiens
  misc_feature (1)...(382): n = A,T,C or G
gtttttgcaatcgcctgtgtgttttctcattcaagaaacttgagtaattgtttacaaaccagaatgtcctctgtactgagcagaagaaccctgcagtcctttgaccaggaaagcaacatgtcaaatataaagagcactgtctcgagaattagagagccaggccttggcttccctctaaccctactggccatgtgactttgggcaagtcacccttccttcctgtgcctcagcttcatcttctgtataatgagaggactggactaagtgaatctcctctaaccgtgacttacacacaaacacacacacacagacacacacagacacaaaccacncaccccaaccncncaccaccaccttacacactttgcccatggatctttat

SEQ ID NO: 226 - DNA, 482 bp, Homo sapiens
  misc_feature (1)...(482): n = A,T,C or G
ccggacctctacattgctcaatatggatttacacattgacattataggaacatttgaaccatctgtaatattagcatgtttctagagaaaagatggctcaagacaacaaaggctataccacctactaccctgggaatgaatgcagcaggaggtacttagctgaggcctccattgtccttatggcatacatctctggaggatggtccagccacgataaatttgcaatacagtaggtctgctctggctggagcacagcagacattttcctacagtgctgggctctctgatgcgagatacctggaacaaagacctccctaatcaaatcagcctttgcctttccgggtaaggcccagcatgtcaatcctgctaaaaagcagaaaggaatcctgaagcagaanggttgtaatatgatganggaggaaccaaaggaagaagtgaggaaaagccaaataatnccttgggccttggcacttgactccttt

SEQ ID NO: 227 - DNA, 408 bp, Homo sapiens
  misc_feature (1)...(408): n = A,T,C or G
cagttccagtgccttgcggggaatgtcttcaccagtgctctaaaaggcaacaggattttctgccctgtatccagcagcttaaggcttttgtttcaaaagggaataagagagaaaaatctctcctatcatgcttttcttgcggtactgttgcctgtttttaactttttgtataaatggaatcattcagtatgtacattttgtatctgttttctttcactctacagtatgtttgaaatgtttttatgttgctttgtatatagttttcttcagatttctgaaagtatgaccgacaaataaaaattctatatatttagggcataccatgtgatgtatatatttacatatatatggaggcataggggaatgattaccaccatccagcttaataaanatatccaccacctcccc

SEQ ID NO: 228 - DNA, 399 bp, Homo sapiens
  misc_feature (1)...(399): n = A,T,C or G
gtcaagtcactgaggtgcagagacactgcctttctgtcctaaagtccagttcaggccagctctctccagagttccaggcttttggtctccgtctgcagatctcctttgctttgaatgagtctgtccctgaggagggctaggagcaaccttgagaaggaacatgatggtcactaattcagccagaacactctcaaggtgcattctgagcgaggctgatgccaggtgcagaacaaacacctcttgcgcctgggagcttcctgaagtttggagaatgtgtcagatatcacctgtttgcccctgggggcctaaccccacccctgtctgcatttcgtgcanactacactnggggcttccgttggccttccgtttggncagcaggaaacttntggcaaaagatca

SEQ ID NO: 229 - DNA, 283 bp, Homo sapiens
  misc_feature (1)...(283): n = A,T,C or G
tgaccgctggaaagggaacaccttgcaacttctcccacgaggctttcgatcctaatgtaaggagcagacctctcccgtcagaagtacatggtggggaaaaagggccatgtggacacatggaaacggattcgggcaggaccagaactatttccttagccacacagatgaagggtttgtactaattcctcagtgaggaggaactggaacccgatatcaaaatccactgtatgtcctntatagtttattgtatataattatgtaccataaactgtgcatggcttac

SEQ ID NO: 230 - DNA, 399 bp, Homo sapiens
  misc_feature (1)...(399): n = A,T,C or G
gcagtgttggtctgcaagcttcaagagccagtgaccctgactgccaagtgatttgccgaagggaattatggttttgcatttgatggtttccaggaactgctaagagtgagatcatccctgaagcagtgactgccagaggaaggcgagagacatatggtggccttacaggagaagaacatgtctnagagagctcctactcctccagttttggccccagaatgaaacacaggaagaagacctgaatttgatttgcatttcaaagtanaactgtcccagctgacatgaagactgatnaataaggaataagtatttattgntgnatgtcactgatattttctgngggccaatattntgtanaaaaacctgnccttgggccncttaccattaaaccttgaagaa

SEQ ID NO: 231 - DNA, 60 bp, Homo sapiens
gtggatgaagttgggtgcttcctgtacattgattttgcttccttctggctcaccaagaaa

SEQ ID NO: 232 - DNA, 321 bp, Homo sapiens
gcagcgaccttcggcattaaattactcccgagaactcccgagcaaagcaacaaaaccatcaaatatggctgagccgataatgcgccattgtggtccagcctgggcaataagagcgaaactccgtctcaaataaataaataaataaataggaacagtgatcactaattacaaaattgaatatcgaacccaaaaggcatatgtgtccaccggaagaatctttctgaatatatcaggtttgattccatgtaatcccacaccagcccaactacccacatccagacccacatccagaacgttataatctgataagtgcgacaaaac

SEQ ID NO: 233 - DNA, 240 bp, Homo sapiens
aagcacctgagactgcagagagtgccatgcaacaggaagatcagtcaaccacagagcaccaactatcacttgcccggaaaacatctaccctcaacactgcccagggaacatctaccttcttctggtcaaccatttacaatctcttccaacctccaacctccataccctctccttacccccttctctcaatatagcctcaccccttgtatgtcatgaaggaaataaacccccttatacaag

SEQ ID NO: 234 - DNA, 600 bp, Homo sapiens
  misc_feature (1)...(600): n = A,T,C or G
gcagcaccttacaagaaaagccagaaaagaaaacccgtgtgtattgtaagagtttaaagagacagccactccaaaagaaaatggacattcacattgacgcctggaaaagaaccaggagtcaccatgcaaatgtgtcatagcagcgagaagtcctgtgaaagcgaaggagatcagccaggctcccgtgagtcacggttcaggattcagatcttcatcttcctaagacactgatctcactggtcccagttattcctgaaacgctgtccctcctccgttttccctgaaatttatcaattaaagtaccggntcttgtgtaaggtaaaaagattaagaagtttgatgagacagagtttacaacagctaaaaaagaagcttaatgggatgggagtggttcacagatggtgcaaattgtctgctaagtggcactttatggatgggcagaatccatgagagttttatcttgaatttctatcaggctgnattcagcanaaactgggtccctggaaattggcattttaaaaaaaatctctgncgggggnctatctttcctgggtataccaatggcagnttcgacccattcnagctgggttcttgaacaag

SEQ ID NO: 235 - DNA, 202 bp, Homo sapiens
gggaaatttggacacagagacagacatgcgcacaggaagaatgtcacgtgaagatgaaagcagacatcagggggatgctggctgcttacaagccatggaatgccgaagatagtgagccgacaccaggagctaggagagaagcctagaactgacgctccctcacggcctcaaaggatccaaatctgctgacaccttgattttg

SEQ ID NO: 236 - DNA, 427 bp, Homo sapiens
cacatgcttacccagaccctgatacgatcctggaccaggcagaagcagcgtccttctcctggaggagcttggagcagcagcaggaggcaggcattacaccccgataagcatgcagagttctgaagaggaagctcgcagcctcactcactccaggcttttcctctggacctgagctctgatacccactgcattgtcagaaccagagcaaatctggaggccagagagcaagaccagcaaagccaggatctctggggtaattaggcccgccttgcccacaggtgctccacaggtggtctcagctcccagcaatgacccagggagaagcccacgggaaccctcagctgcaaccaatcctccagactgctggcctgcctgccttcctgaaatagtccagatttcacttattaaacatattaatctgaaagtt

SEQ ID NO: 237 - DNA, 248 bp, Homo sapiens
  misc_feature (1)...(248): n = A,T,C or G
gtcagagagacanggaaccaggaggccacgactggaaagtccaggcagaagagaactgtggagccagcccagggaaggacagaagtggaaaagtcaccacagacaggaacaagcttcctggcacacgacttncctgccaaacaactcaactgtagtcaaaaggaaagagatttgtctagtcctataccaggacaaggaggagattccaaggtgctccaaactttactgattgtgcccttgttcagtta

SEQ ID NO: 238 - DNA, 401 bp, Homo sapiens
gtgtgaacttgtatcccaggctggccagttaggatcttccattccatccccaccaccatgactggttcaggaacagggaatgagattcgatcctgaaacccacattgacactactgggaaagataaattcccctccccaccacccattgaagagactaatctggagctgccagtggccaccatgtggaaaaagcccacacaagaatgacaccaacacagagggagagccagcctgagagggagggagaagaagaagaagagacccgatggcatcttttcagctccgggacccaggtgtactccacccactcgactttctggatagaaaagccaataaacaccctctaatgctcatgccagttggactgtttttcaattaaaataatcctaacacacccttt

SEQ ID NO: 239 - DNA, 490 bp, Homo sapiens
  misc_feature (1)...(490): n = A,T,C or G
acggagtctcactatgttgcccaggctggccttgaactcctgggctcaagcgattgatccacctctgcctcctgagtagctgaaactacaggtaatctgcatctcattaattggaccataagaccaagcagccagacctcagttttatccgggtacaaaatctggcagctccactgggacagagctgccctcagcagctagaggcttgtgacctgacggtctttaggagactcccagcagctgctaggtacagtttgtcctgaggacgcttctgagaactttccctgggcaaaaggaccacccatccccttgctactggggtagaanaggggctaggacactgaaggggtgagtaaaactggatcataagcagggagtctattgcttccttatcaggggctttgcaaagccattcntttttggtanccctttaaggagacaannngggctttntttgannttttcncttngcatatngcttggaaaaata

SEQ ID NO: 240 - DNA, 330 bp, Homo sapiens
  misc_feature (1)...(330): n = A,T,C or G
ggagcaagcctgtcaaccannagcatacgaaaccggagttcttgccttatcagcccttctgcatgggaaagctgcctcagcacggctctgtctgtgaatgcctaactcttcccaattctgaggtcagaaccagcanccccattggctaagagaactgaagctatatcctccaacttagcttatccggttaaaagataaaaggatgatattttgantnctgtaannaaaangncggaataggccttgaaggctcnanttganccgggnccaaanagctngaannggggganctgnnagagnancaccatgagacggggaaagggggatgga

SEQ ID NO: 241 - DNA, 139 bp, Homo sapiens
aattgaaagtgaagaccgatgaatcatgccttctgatcaagacccatgttggagattgttgccctgaccttgggaaagtctgtgtccatgtaaattcagatcttaatgaaacaaaaataaatgtaaagcattttctggg

SEQ ID NO: 242 - DNA, 457 bp, Homo sapiens
ctgaggccaaagccccctccccagagcagacccctagcactccacagcaggatcacaagctggtctctggtcccagaccctgcggatccttgtcgacgcttccagtctcgatcacttcccgatggtttgaatgtgaagtcaacaatccacggaacaatttgcacttactgtttctagggcttttgcagttaaaagtgtcttcagtttccccgatcttcctgcaggtgcccctgcagtcagaagctgagtctgtcccttctcccagcagcagctgggtacaggatctaacatcagtctctgcctgctggccagaagccacagctgcaacgtgctttcaagaaaaatgggccaggcccaaaggagctccccgtcaagtgcttttcagtgttcccagcacaaagataaaattacacttccataggagtacacaaactaaaaataaaatttaaagaaagcg

SEQ ID NO: 243 - DNA, 420 bp, Homo sapiens
  misc_feature (1)...(420): n = A,T,C or G
gacgtctggttgctcctgcnttaagtccatctgagatcaactgtcacttttcccacctgctttgtgactcatgaagctggccttcacggactgccccaaccagcctctccagctctctggtttccaggtatcctctggaatacctggaaatatacaataggaaacaccatcatgagataggaaaacaggagaagagagagatgaaganaacaggaaggaaacagattgagacctctggaaacagatattgagacagagttgcatgcagaagatttattgcggagcacgcttgggggatacacctataaggaacttgatgaangcaaaatggacacagagagaggctgactcgtgatacagctgcatccaggacatcagctgatcttatatggagatagaataaaccttcacagttgtctc

SEQ ID NO: 244 - DNA, 463 bp, Homo sapiens
  misc_feature (1)...(463): n = A,T,C or G
gtgcttcttgactgggaaggagtggaagaggtcctaggtgcagaagggtatggaagataaggtcaaaggatgtgctggtgggaatgggagacaactgagaaggtgagacaagctggaggaaatgtcaggagctgctgagagaagctcagcctgaccagagatgagaattgccatcttgaatcgtcaggaagtgaaggaaagcccaggtgaatgccacccaatcaaaaagaaaaaacaaatgcagatggtaaggtagagaaggctctgaagcccaggtaatgagagccatgttaccctggacagaagcatccaacaccacacatctccaaggatgttggagatccagcatctggatccagctaacttctgcatcctcttctgtcttcaaaaagtaacattggccgtccttgcntttgntggacaacaccccctaaaacgagtgtntttgtacgttttcacacac

SEQ ID NO: 245 - DNA, 317 bp, Homo sapiens
tttcaggggtaatcttgtgacaaaccaggcatggagagctagctgtgaaattccagagatgatctcaaggtaattagtctacagcccagccactgctgagatgacaccagcacacgctccaggtggaccatgactcaagacggccaccagaacaaggcataccgaccttacactcagcaccatgcccgcatgcctccctctccaagttcctcttttaagcccctctccccagcctaaagtttgaaatgtttcttgtaaggaatgagcctggccatttccccaaccgctggcttttggaataaagtcactttcctttt

SEQ ID NO: 246 - DNA, 320 bp, Homo sapiens
gctcctgtgatcagctgagtgctcgttaattcccacgttcactaaaccatcatagttctgctgattctcagctttagagggaaactctacagtgaactttttcaattagcagtcatcaattactggtcagaatacattataattgtgaaaattatgctccattaatctcattaaatgtgcctaaacctgtaacttgtcatagttcgatacataggttggctatatttaactttccctgatcttatttgccattttttgcaaaagcatcatctaaaatgtagagagagttgtcagtaattttggctttttaataaacattg

SEQ ID NO: 247 - DNA, 218 bp, Homo sapiens
gtctcacagaactctcttctcttcagaatccatcatcttccctgactaagaattcactgtatggagagcactaggagttgtaagagctccaagcctaacataagagacattcatccagcttttagataccacaatctattcatctgtgcctacttacagccaaatatcagaattacatggaaatgttaggctcagaaccataaagactgtcagaagag

SEQ ID NO: 248 - DNA, 546 bp, Homo sapiens
  misc_feature (1)...(546): n = A,T,C or G
ataatgaaataaagctcaaagaggctcagtttccaagattacacaaccagaaatgacagaagatgggtccctctgggattcacgctcctctgctgggagtttcacaccattcgccatgtcaacatgaagcaacagctgggttgaagagagccgataaaaatagcagcatcgcactgcaagcaagccgcatagaaaagaaggggagtcaccgtacttaatgcagggtggcattgatttcttgtcttcccagtccagtggtgtatttctcggaccatctactttttcagaaagagcaaagtgagctgcttgtccatatgaggaaagagacgctaagagaaattgaggaactttgctgacctgatgtaactagatgggactagaaaccttggctcgcggaccacagagttgacattacagccattcacatgagtttgcatttgtcatctgaaccttctggatttctatcatgtcacttgctgcggtctcttgnatttgtgggaattaaaattaaattggggaggtttttattgacttcttttctttgag

SEQ ID NO: 249 - DNA, 427 bp, Homo sapiens
  misc_feature (1)...(427): n = A,T,C or G
agagacagagtcaagcatctgctagcgtccttggacaagaatgcatgtgtggacacagagacaccagacgccaatacctggaggaaaactcacagcctctgaccagaagtgaactagcaacaatggtacagttaaaggatccgccttgccactcggctccttataccaaaagccaaacctcttttgctaaagcagagactgttacatctcagcctcaagctggcaaatcctgctttggatcccggcagaggaaattcagccgttcattagccttaacaagctgctgtcactaagcgaagaaattacacgagcagncacacacccggggcttttaanagccntccccccaagggcaagcgggtttctccaggacggactgtacaagttcacacttcctatgtgcaaatccggactgtcttcttgggct

SEQ ID NO: 250 - DNA, 530 bp, Homo sapiens
  misc_feature (1)...(530): n = A,T,C or G
aacatgagctcaggagggctgggatttggcctgccttgttccctgcagtactgccagaactagcattgcacctggaacatggaagggcccaggacacagtggccgtgggacaagagcatgaagccccagagcctcaagcacagatgtacctctcctggggcagggggtttcactctgccccacagcgggaggctacagcctggccatcctggggaaacccaaagggaacacatggacagatcagcatccactntnaaaagtgccaatgacttcaagctggaatccacccacaggctggtcgnccctggctggccaggaaaaggctttatnaccatgccacaaaagctttcaangggcttttttggantttnaanccccctggcctaaggtttgaaaaaggcanggccccccccaaagncctttttttttggggggattttttaccctatcnnattttaaacttcaaanaaaaatttttaagccttncccngggaattcatctttaaannatttgggtcggtttttttaac

SEQ ID NO: 251 - DNA, 279 bp, Homo sapiens
  misc_feature (1)...(279): n = A,T,C or G
cacccataaaattcaatggaccaccatccggacaaaaggataaaaacagaacacatcaagataatgaattttcttcaaactactgaggtacaatgaaaaatggaaatattatctcagaaattacaacagagggatgaagatatagcatatgctgtacctaaaagatacatcaaatgggacattgggaatatggattgatgaaatttaatttgcgattgncctataatgccttttcattacagtaccacacaaattgaggcaataaatgtatatttgatc

SEQ ID NO: 252 - DNA, 296 bp, Homo sapiens
gatgagaacctggctgtttaaaaacatggaatcagtggagtcctgaatagcagcacatgacttgcaacaactttcaacatctcataaaatggctgctcagcattcactttccatctcagagtcacttctttggaactgctagggagtccagggtacatttgagtcctggcagctcatgtcctgctctgtggcagctcttcccactgctcataggagtcccatacccacttctcaaccatgtccggctgagcattacaaatcaccttctgtttaaaataaaataaaataaaaatctg

SEQ ID NO: 253 - DNA, 548 bp, Homo sapiens
  misc_feature (1)...(548): n = A,T,C or G
gatgaagaaaacgcagatcactctaagaatgacaggtttcctgggtgctgtgaagcatacctaaacagatagctgcaaagaaggatcttttctctatttcaagacatgaacactgccccatccccactcctggtattttgtaccctaaacaaaattgggtatttgcctgatataacctgaaaaaggtggtgcattatactttacatagtgatttatagtttacaggctgcttttacgatggtctcatttagttttccaaaatcaagctgngatataagtgctattattcccctttttaaaaaggggaaatgggggacatgtganggtaaagtgagtgggtcaagggtacacgactagtcagcagcagaaccaggactagaattgcaagcccagtgttcttganggttgagccccaagaaactctgtccagggctttgcatcatggggatttggcccacccnccntaagcancggagggatggantgcaaaaacactggcctttttcttttgtcccaancctgcctnttgggaagtccaggaccaaaaa

SEQ ID NO: 254 - DNA, 219 bp, Homo sapiens
caggtaaacaaccaccacagatgcaggaatctgacagattatgaatctgctgctaatactgctgacttcagtcccaggctactctgccatgatacagaaatatgccaagtctgctccaggaagctgctgaatcaggaatccacctaccacattgggcagtcactgctagctgccacctcggccttgatcctcgccagcaaaatatatgcctcaaacttg

SEQ ID NO: 255 - DNA, 374 bp, Homo sapiens
atggggatttcggatgttggaatcatgaggcttttgtttaagagttgcttaagatgttcttcagatcctgaattccagcagaacagctgacatccacaaccagtttgaggatccccacagaagagctgaatcaacatgagaatgcagtttcttcatctctccagtccatgacttcaccctgcaatccccacagaagagctgaatcaacatgagaatgcagtttcttcatctctccagtccatgacttcaccctgcaatccccacacctcagcccactccaaaccccttacaaactcctcagggaggcaaatctgaggtttccttccatctccttgttcagatgccctatgattattaaaccctttctctgctgc

SEQ ID NO: 256 - DNA, 199 bp, Homo sapiens
gtcatgcgtttaaaaagaagagggcattctctgcctgcctgctgcttggacagtgaacttgactgttggccatctcagactgcaaatgagggcaatactatacgaggaccaaatgacaatgaaggaatcgggatccctggatgacttcatggaacaaagtcatcgtatctttcctggaatgccagcttccaatgggtgc

SEQ ID NO: 257 - DNA, 463 bp, Homo sapiens
  misc_feature (1)...(463): n = A,T,C or G
gaaggtcaagttnnaagccccgatggatttgatgcagcccttgttgcttgnangatgggagggggttcatgttgcaaggacgtgggtgatctcccagctaacaccagcaaggaaaccaggactgcagtctcacaaccaaaaagaattgaattctgccaacaacaagaatgagcttggaagtggattttcccccaaagtctccagaggactttgccccctgagcagcgaagccagccatgctgtgcagaacttccgacctacagaactctgtgctaacaaatgagtgttgttttaggctgctaaagtttgnggnaggttggtacacagccattcaaaaattaatgtanaggggggaaaagaaacaggaggagctcanataagcttctcccaccaccacaagctgcatttaaagtggatagcatcagcttcaggtagaaatncaaggaangtgtgttttgtcaac

SEQ ID NO: 258 - DNA, 34 bp, Homo sapiens; identical to SEQ ID NO: 142

SEQ ID NO: 259 - DNA, 149 bp, Homo sapiens
  misc_feature (1)...(149): n = A,T,C or G
actaangaaaanctntatgaggatacancnagagggcagccaactacattcctggaagacanccctgaaaccaacactgatggcacctagatcttaacttctggcatntggaactgtgaaaaaataaattnccattgtttaagccatgc

SEQ ID NO: 260 - DNA, 440 bp, Homo sapiens
  misc_feature (1)...(440): n = A,T,C or G
ggaggaaaaaaatgagcagaaactgctaacatctggaggctgctgtccagtttacgtaatctcttgctgcagaggaggaacacgggatccccagccagatggtccgtgggtgacttcacagcacatgtgctacctccaagacagggttctctgaggaacaaggaccttccagagtgatgcttttccctagtggcagccttggccagggcaacagacatctgcacaaacgcagggtgttgaagcagctgttctgagatgcagtgcctgagaatctgggatccacaatgtgaacttcccaacaacccctgcacctgccactttccttgatctttccactaagcaccagaagacacatgcnttttaaatcaaaggaatgtgagttggaatttcagcttctgccattcactgacaacatggccttgaacccttcataaactcta

SEQ ID NO: 261 - DNA, 253 bp, Homo sapiens
  misc_feature (1)...(253): n = A,T,C or G
caganactgaggacctcactctgtcacccaggctggagtgcagtgggtgcaatcttggatcactgccacctctgcctccaggctaaagtgatcttcccaccttanccttacaagggagcagggantacaggaatctggcatcttcctttaactttcagggaaccatggggggaaactacccatnggctttggtaaagccaccaagttggcattcctttttaaataaaaaaccttggttaaaaccaaaaccttt

SEQ ID NO: 262 - DNA, 451 bp, Homo sapiens
  misc_feature (1)...(451): n = A,T,C or G
ggagtggaagaaagcagacaagatggggattgcccagctctgtgaacgtgttggatgggtgcgtctatcccgagtacaacagaatctgaactcagggcagtgtgatgtactccagaatctaccttctgatggtcatgggctcaggatgggccttggaggagatctgcacaggaagcacaaagctctggttaccactggaagccgtcttgcccccataaaccagccttaggatgccactgatgctgtatggcagaatggagtaacagagagaatttgcagaataaagaagggacaatgcagtcaccaggtcagcattaagggaaggcttggctgcatcatctgccactctgctgctgctgactctgccagtggggacagcacatgcttccttctacgcttgcctgaggntcgtaacttcaaaaccccacaacnntttttggaaggagtaaaa

SEQ ID NO: 263 - DNA, 210 bp, Homo sapiens
atgaaaaacagaagcaacaatatgaatcaaggcattctcaccattcccaagcttggagggaaggatcctgtggcaggcaaatggaggacatcaggagataaggcaaggtccctgccatcaaggacctgacagccggctatgtgattctgggcaagtcactaagcttgtttttacaactgcaaattgagataataaaattatctcccttgg

SEQ ID NO: 264 - DNA, 324 bp, Homo sapiens
ggtgagacaacgataagtaagcaaccacgacacaggaagagacttgtcggggagtggaagtgctcccaggagcatcaacttcgcctgtgggctgggaaagtgtgcactgtcccagacagacagaccaggatctggtgatgttcccaggagccaggcacgaaggatcaaacagtgaaacttaagagtttgagcggccttgcctcctggatcttgtctttgcctttagaattgtaattataggatgtgtgtgatttttttcccacttaacatgtcgtgaatattttccatgtctatgtaatcctttaaaagctatttacaatgatt

SEQ ID NO: 265 - DNA, 82 bp, Homo sapiens
  misc_feature (1)...(82): n = A,T,C or G
acgggagtctnactatgntgnccagcctggncccgaacccctgnccttaggantnttaaaangnaaatagccccaatcattt

SEQ ID NO: 266 - DNA, 245 bp, Homo sapiens
aaaacctggcccatacagagcttacacctatgaccttggcttcgtgggcaccatgatctcagcaatgcatctatcatgcctgcctttggacctaatgagtatgaaccacattacatcagagaagagtgccagggtcaacaattaatattttagagttacaactacatgtgaacctatgtacttgcattttcagcaatattgcagcatagtattatttatctctaaaataaaaaatgcatgaatat

SEQ ID NO: 267 - DNA, 455 bp, Homo sapiens
  misc_feature (1)...(455): n = A,T,C or G
ntgctattgnctnaatcgnnggaaaatncnngganngaagcgctagnnnaccttctcngnccnntnccaacaagcccgggcctncntctgntgncatganacctcgaggtngcaaggaaatgctaatggattccgaggggcatgctacttacctacatggaattggcttcnnaattcactgggcaacntactgagactaccgtnnaggctatttaatcatcttcactatgaanngccaattctttanagtnttatgacattcatgaatgangcggggggcggncatgatgaatgcagagcaattccctgcgacagatactttcagggaatttatgccccctcccccaagaacaaaagggctcctgggctcagttatcatttgntctgcgagagaaattacagtcttttcagcaactncntttaccctactcaataaaaagcgcttatttttgaaa

SEQ ID NO: 268 - DNA, 182 bp, Homo sapiens
agtgaagagatttctgacttcctgtcctcttccctgctatattacatacatctgcttaaactctggaaaacagtaccagtcaaagtggtgctgaaaccttcctctaagacaaactaaaacgatgttaaaaaggttacacgaccttactatttcaagtactggtataaaaccactttctctgc

SEQ ID NO: 269 - DNA, 502 bp, Homo sapiens
gcagactcaacttcttagagttccagcacattgagccctgtttgtctcatccatcttttcactgaccttccaaaggtggactggatggagaaccccagctgtccattgtgtttgaaatccctttaagtagggactcggctagaggtgttcttctgcctgatccccagatgaaaaggacgggaggggagtgacagaggagtcttcagccagctgccatatccccatgccggaccatggaacctgacttccagcgcactgtagcagagaggtagctagagagcagaaagtagagatttggctctcctagggatcttggagagaactttgttatttcagcttttgagatatcttctcttccttcataaggatgagacccagggtttcctgatagggcactgccctttaaaatggactttgggaataatttggcccactgggtttttttgaaaaagaataaaggttggggggtgggaacctaaagccctaccccctgggggaattg

SEQ ID NO: 270 - DNA, 186 bp, Homo sapiens
aaaatgagcaacttgaaagcagaaactataatcactgtgaattttcccattgacctgccttgcctcttgccaatttttatgaatttttctatttccctcaaaaccttgtaaaaggactcttcacacagcagaattacaacgacttgtctgttcaatgaataaatcagctcatctttatcttctaag

SEQ ID NO: 271 - DNA, 386 bp, Homo sapiens
gcattatcaactgatgtcccacaatggaggatgaagatttactttctctctcatcaataaaaatgtcggataatttttgtgggtacgcaattccaggttgaaaattaaaggcaatattccactgtattctggtttccaatgtcggtgtgaagaaatccaaagccactgatacagatataagaaaaagatttgagtctttctacatcaagcagaacatccttggaatttctagcctggatttccaatgccaacagaatgttcagaaggcattcaggccagtgaagttaccaacacaacaaagatgaacgcttttcaaaaaagaattgcattatttgctaataactgatacttagcagcaaaataaaaaccataaaataaagaggctg

SEQ ID NO: 272 - DNA, 482 bp, Homo sapiens
  misc_feature (1)...(482): n = A,T,C or G
atctataaactaagaataatctggagaggtcaattcctaattagaacctagtatggaagactaggatcctaaaactcagtggtaactccgaagagtaaaaatctaccccagagctatacgtgaaagattggaattttacagggaggtttgcattttaaaactggttgctgagatttcaccagaactaccacagaaacataccaggaaagctgagagaatccacagatcctttgaaggaagtggcttgctgttgcaggctccttgagacagccaaaaactgacctccagtacaattttcaggagaagtggcaagaatggacatccacctcccaccatgtgatgacatggaatttttggccaggtacggtggttcaaacctataatcccaacactttgggaggctgaggcaggaaaactgnttgagcccnanaagtttgaaaacagcctgggaaacatgcaaaacattaaaacttgagatccaa

SEQ ID NO: 273 - DNA, 479 bp, Homo sapiens
  misc_feature (1)...(479): n = A,T,C or G
gccaatcctaacccagatcaaagatcctgggacagctggaacaggcatggcctaatggaactcccaagtggacagggccaagcatggacggacagagcttctgaaacagtcctcagaccccgtgcatctggatctttctgtaggaaccacccatcagcagtgccagacagaaccaagcacatgcactgatccaccgcacgatgggagctggtgtgggtgagcttgtttgctttagccatgcccacagacaggaacagaagagcacagtggaggccaccagccctctcgcctgctatttcaaaaggggttgcagcagggctggaaagcggttcccactgtggttgcccccttcctctctgcggcacacacagacctgaaaataaccagagagggactgtgagctgccagcctaaaacaaggaagnttgcanaaagtcctaggctcagataggagagtttaaaagaatgttgaaaccgaga

SEQ ID NO: 274 - DNA, 490 bp, Homo sapiens
cccccgttgccactgaaggctgcatttgagagatgcccaactgactgagacgagaacagaggtgctaccctggaacctggccacaaggaagccctgatgtgtttacagtgtgagcttgcccacaacttcaaattcatcaccatcatgctctaacatcgaagtcctcacgtgcctcacataaggaagcacaatttaaacgtcataatagccaatgatcattaatgtttactgagctcttttaaagcagaaggaactatggtaattgcttcccatgcactacacactagttaatcctcacagccaccacccctcatgttagatactattatcattcctatttcatacacgaagaagctgagcttcagaagtggttaagtaacttgctagagaccaaactgtaaggagtaaaactgaagcctatgggcctatgactcctaagtcaagactcagagccactctgcttatgtctctcataaaatatatttcatgg

SEQ ID NO: 275 - DNA, 344 bp, Homo sapiens
gacaagccacgccaaggccaaagctgaggcagcggaacaggccgccctggctgccaaccaggagtccaacattgctcgcactttggccagggagctggctccggacttctaccagccaggtccggaatatcagaagcccatggaagcccagggagatgtccctggggcagacactaaggcaggtgttgaagacaagctgcttgtcaagaagcatttcccggcaagagaggggcaagtctggggctccaactgggtacagcctgggtgcagttataagcccctttggcttacttggtagaagatggctacttggatgtacctcacttaaagatgttttgtaccac

SEQ ID NO: 276 - DNA, 29 bp, Homo sapiens
  misc_feature (1)...(29): n = A,T,C or G
ggctgancacagtgagtcacgcctgtaat

SEQ ID NO: 277 - DNA, 470 bp, Homo sapiens
  misc_feature (1)...(470): n = A,T,C or G
gagaaataccatattatccccattttgcagatgaggagacagaagtggagagaggtgaagtgacttgctcaacatcacacagttgccttcccacgtgtgtgagaccattgctgtggaaagaagccgggcctgacttcagggatctggtgtgaaatgactggacccatgcgttctgagtaaacaagagagccccttctggcttctccgggaggaaccaaatggcttcagcattcagctccaaagcccgatggagaccaagagtgatacactgtactcatgatcaactgctcagttctggtttgggcctctgagggctgatggggtttggcagaacctccagcacaatgttgaatggaaatggtgatagtgggcatcttgtcttgtacccagtctcactatgtggaagcttcactatttcacaatgaaggcccagaccggngactcaaacctgtaatcccagcacttttgga

SEQ ID NO: 278 - DNA, 504 bp, Homo sapiens
  misc_feature (1)...(504): n = A,T,C or G
atgtgttggctggagctgaagcagacatattggaccatgtggtgacaacgagaattgaggccaccatggcaggacaaggtgctgcagtgaataccacagacaactatagtttcaaaggttttctaccagcaaaagacaagaatttttgaagacactgggatataagaatccagcaaaacctgttgcttgggcttttaattttacgtctggtctccaatggccttgtatccaaccattggcttaggaagaattcttgtgacctgatgccaaatctaaagtttgttgtacaggagcagcccagatttggtgtgttcctctacacaaggaacaattgcctggagacatgattcacagggaggagggagtgccttcctagaagagctatcataaaaagggtacacaagtagatgctcaatcagtgctgactggaatgaaaagaaccaaagggatgaaaagaaggaatngaagntttgcaaaagatgaagctctanatccttgcgacag

SEQ ID NO: 279 - DNA, 509 bp, Homo sapiens
  misc_feature (1)...(509): n = A,T,C or G
gagccagtgtcctgggctaaacacaagagtgctgattcccactgtaagttacagtgaagaacttctgctatctgagggcatgtgttttcatcttcaaaaaaggatggacagtccccatgaaccttccctctccaaccacacaggccttgcttctggacatgcagtgataactctctgtttgctggatgaagatcatgttggctctatgcacattcagataaccttctacaccagacacccctggtgattgctctataaatcatattggccaggagaaaggatgttcagttccctaggcttttcatcatggtcaattagggaatcagcccaaaaggtcagcatcactgcccttaaatgangtcacactccatgcactctgagtaccccggaaaagctgtggngctggtgattaatgcatgtgtccagaccctgggtttcaacgaaggcaaatccctggcatacaatnccaacttggctcttcttactgggggggattcttcgagctgggc

SEQ ID NO: 280 - DNA, 490 bp, Homo sapiens
  misc_feature (1)...(490): n = A,T,C or G
gtggcangtaaataaggataagagatgatagtcaggcacgtaggttggaaccaagctgcacacaccgcacagtggagagagacctgatcctgcttagggcagagtgggggaaaggagccagggcctcctcctgctctgatccccaccagctcatgaccttggaccagcccntgacctcgcaacctcgcagaactgaaaaactctatgntntgnacgnacgatnangagnganctttgnaaattggtncttaaacttggaagtgcaacagaagactggagacttcacatagaccattgggcccttcgcccagagtttctgatttagcaggtctgaggtaggacctgagaatttgcattttttgttaangnntccaaaanganctngannnnttttcnttttgggaanaacacttttaaaaaactactgtttcaaaaacaaaaantttggtggttttaaaaggatgnggaacaaganaactttttccaaaag

SEQ ID NO: 281 - DNA, 520 bp, Homo sapiens
  misc_feature (1)...(520): n = A,T,C or G
gttcagccanncantggccctgngangacangnnaagncnccngnctcgnnctgggccctaatgaaaggactcaagngangccacccctgttagcgcgctgagaacatggcttggtgtgctcctctaacttggganagaatagggctgtctgntgtctntaccgcanagggctnacatncnctttacgggatccgnntcngaggannngggccatttctcttcccttatctgtttatgatgcgatatgttccaaagccgatcacatcagccgctgttatggtgaacggaattcactgtgatggcggctgcaccagcagagccgcgtgggcttcatgccacgttacgcggagtctangacggcctcaccccgctggctcgggctccctctcactggggtacacatttatcgggatttatgctttaaaacaagtagttcacattttttttaatgggggaaagtacaanaactttccattttggcggngngacctancaatgggcttaacttttgttttttgt

SEQ ID NO: 282 - DNA, 386 bp, Homo sapiens
gagcaggaagctgcgtggtaatcccgcctgcaaaagctggaagagaggggcggaacgaaagaaccaatcatgagccagagacaaagaacagagtaaccaatccttgggttgaaaatgaagtgggatggaacctgggccaaatagacacttgaaaaaacaaatggaaaaaaaaggttgatgtaagtcccaccctttagatctcctataggacaggattgtggagaatttgctgtcatatcgggacaacctcttcaaggggcggggcttagggaaggggtggggtcttaaagtgggcgggacctagacgaagaaggcggagtccaaatcatcactggtccactgatccgagatgtccaatatcccacttaagatgtaaagtgtggggt

SEQ ID NO: 283 - DNA, 489 bp, Homo sapiens
  misc_feature (1)...(489): n = A,T,C or G
caataactatccaccttcgacaccttgtggaccatgaaaacctcaaggatagagcaagggttattcatcgctgtatcgctggtatccagctccatgcctggcccagatgagcagctgagactcaagatattgtttaacttgcgcatgtttgcataggtagtaacagtgaagatgggtctggagcccagcgatctaattactactcagaaacacctgtgtatgcatcgtgctctcaattctccacctcctcgttccaccactgctgctgctgctgctgctgccgccctatcattacaaaccagctcagcttcctcatgggcttgtatttaagcgcctgcctgtcacaccaacttactacagctaaatgatgatgcaaattctccaggnttgcatcaaccncatgaaaaanccnccacctttacttaantttttttttttaaaaaaagaaaaaaacagganggagcttgttgctcaactgacctaagcttt

SEQ ID NO: 284 - DNA, 181 bp, Homo sapiens
aatctttgagtccacgtggaggaaggaaggagaagaggagaagactgttttccaggatggaaagggagcctcgctttctctttaggtggattacagaaattggttgaattctccctgccctggagaaaagtcaatttattttttatgttaaagatttaggctcttcctgagggctactatg

SEQ ID NO: 285 - DNA, 319 bp, Homo sapiens
agaaaccaatcggacacatggccgtggcagttaattctataggctccccacctggataacacccaagctcaatgcagccccacccaaagccaataccttttctccaacctgccccttctcccaggaaagggcagcctgtcttctttggtaccccatcatccacccaattacccagagtagaaaattcagtattatccccctatctaagcagtcgcccagtctggctgcatctactttctcaatctgtttcttttttgtcctcctgtagtatcttaaaaacataaagggaaaaagatataaatgccaagcaaaggacttg

SEQ ID NO: 286 - DNA, 230 bp, Homo sapiens
cagaaaatggctcctcaattttctatctcatgtggaggcaacatttctgcatcagattcagcctgtgggcaaaggaatgaggcttcttctacgatccttcaggctggcccttcctgaagtagcaaagcatgtgtcattataaaacatgattgtaactcctctttcagtgccactgattttgtcgtgtgggaaatttttggcaggttttggcaataaagtgtctatcaagc

SEQ ID NO: 287 - DNA, 329 bp, Homo sapiens
agggccaccacagatccgggcatcctgatcaacattcagtggcaagcctggaggggcaatgcttgcctcccattgtatggcaggccagatatgttcctggcccatcagaagcctccttctggatgcagtctataagccactgtgatggatgagaagagcccaggatggaggtgaaagtctggaactggaatctgagcccttatttttctgactcactgttttaccttggaagaatcactgaagttttctgcatctctgtttcctcatatgtttaaaaaagaaagcacttaaccttggtggatgtgaaaaataaatgaaataatttctag

SEQ ID NO: 288 - DNA, 452 bp, Homo sapiens
  misc_feature (1)...(452): n = A,T,C or G
gaaatgcatcttatagcagagagctggctacctgccaaaccaaacaatccctgagactgcggcagggctgggaagcaagctgagctgccacgctgctaacttgtcaaacatacataccggctttgcttaacaacaatgcgacacgtgcctgctagaagcctaaggaaccaacatcagaagacagatgagctataaatacttagaaagagtacaatccctcgatcaaccaaccaccccaaactttcttcatcctgttcttgaagaagtgcttctttactgggagcgtgacacattcagacctaaggagccactgagaaatgcagcaaataaagcatagagagcacatttgaataaaaggaccagagaaccaggaaggaacatcaagacatgagatctacagaatcaaagagaaagccctcacattatatcatgagattncaatggcagaaggc

SEQ ID NO: 289 - DNA, 476 bp, Homo sapiens
  misc_feature (1)...(476): n = A,T,C or G
gtgaatcccattctcatttttgcagtatccaagagctggatgcctacatgatgcagtccacagtggctgagcaccttctgtccctgggatctcagactctgcctgccacagagcagatgactggaaaaccctccccacttgctgtcatcattcctgaaaggtcttcaggtgtgccagcaattttcagactgaatatctacaccagaaaagcacataactaccatgagcataagacgtgggagtgccatggagtgaccatagaagtatagacagtaagatcacagccagatacaacttcttgttttatagatgagagacctgaggcccagaaagaggaaggcacttgcccatggtcacacagtgagttagtgagactggagcccaactcttcaggggtctgggctggggcttanccaaggctggttaggcaatnggctttcctggggttctgggcaaatcattttttgcctactctg

SEQ ID NO: 290 - DNA, 458 bp, Homo sapiens
  misc_feature (1)...(458): n = A,T,C or G
gtcctgctgaggatccctggtgcccagtagggaacaccgtgaggaggaggattaagaaaggcaccctttccactgatttgcatcgccatttgtacatggagtttggctacagcaaaatccgttgctatctcaccagctacaagaagcaaagaacgaattgcaattcatttttgtgctctaggacccggttgaggtctccttgctgacaaaaaaggaaatgacttctgaagacatgaaaaaaaaaaacagggngaanacaaattgggttanaataacccatgacctaaatcattanactttgactaatgaanaactgccttttaacagagttaaaattgacagcaccatggcctcacacccaacaggggtttgaggctggacccttntttgacaaacgatgcccttgattacccncaaaatacccatcacagcattatttataatattcctggccaaag

SEQ ID NO: 291 - DNA, 471 bp, Homo sapiens
  misc_feature (1)...(471): n = A,T,C or G
gaatgcagctgtcaacagctattctaagtattgttgacttgggtgaggagatttgtgtccatgtttgaaaatatgacatgacacgaagcaaagagaatttcaaaactcctgaccaaagctggtacagagaaaaactgactgctcaaagaactccatcagatctttccagcaatctgtgcatggagcgtgcacttgaaaagcaagtgtgttttgagtgagcaggaggacagattcagccacagagggcaaggagatcctcctgttgccacatttggaaggtgaaccattagctgccttcctggcagatgcctactgggggtctggagcttggaggtgacacatggagcatgtcctcctccactttcttcctntgtcagcttccaagaaaaccaganctggaaatcaaaaggataccccagaggggcagtagggccctcccanatggctgancagatgctggcaccatgcctt

SEQ ID NO: 292 - DNA, 349 bp, Homo sapiens
aagcttcaaggactgaatcctgacaggaaacaggcacctccaggattctctccccagcagaagattacttcaagaccggagttccctctggactgactgcaagattgaatgtgattgatttgtaacctgtcaggtccacaatggtgccatggaacaataattcaagataagccatcagagcaagtcacaccatttggcacctcctagcccccttcctctcttgcattccaagcccctcttcttaaacccttgccgtctctccagaaattggaaattggcaatttttggaaaggattccagccactttccccctcgctggcaacggataataaaaatcactttttttttt

SEQ ID NO: 293 - DNA, 226 bp, Homo sapiens
  misc_feature (1)...(226): n = A,T,C or G
aaaaagaacaaatcacctgctgcctcggcaggacaggatttctgccnntnccacctgtnngcagccgntcatggcttccagacaaagtgggggcccggggcctgcagaacagtcggccacattcaccagcctgtctctcctctggacctcttggcacangcttttactctccagactgtgtgtgtttggttgaattgaaataaacacagcaggattttgttttatt

SEQ ID NO: 294 - DNA, 217 bp, Homo sapiens
  misc_feature (1)...(217): n = A,T,C or G
gtaaatccaagagtcaccaaatctttcagcttttcagctaaagaaagaaacaagtgaagcaatgggcagaaagtgntggntttcattaccnagagccgtcttcttccagccnaaatgtaatttacatctgagtgtttgggttcatctgtcacacgagtattatacaaccccaccacttaccctgaaaataaatatgagctcctcattcaggtaaatg

SEQ ID NO: 295 - DNA, 407 bp, Homo sapiens
ttggtgaccctgaggcacagaaagctgagggaatttgttcgaagtcacacagctgggtaagaaagttggtggttggttgttgccactggcctacggcttttgtccagagaagacgggaatgggggtccagttacccaaccccttcagaacagatggtttctcatgcccatggaccttggttacggagtgtgaacaggattctcctaaatatttcaacttcggaagaccggattgaaagtcatctcaattaagcaaggactgagagtgtgcaaatattatttgaacgttggttaacttttccttaaatggaaatgaatgagcagtaaagtcactttgatgaatcttatacagagcctctgtcccagagtcctgaaacttcacctgatggtcataaaagaatcaaaagt

SEQ ID NO: 296 - DNA, 498 bp, Homo sapiens
tgggagagggctggaagtccattccaaccacagaatacagtcccttcatggaaggaaagtaatttaacagcaacagtccaggaatcagacaagctacggtcccagaggcaagcgttggaggggccttctgctccacggagacactgactccacgcagggtactgaccagggcaggggaccagagatgaatcaactccagcccgggagctcaccgtccagcaggggagataaggcagatggaaaagtaactataaaataaggcagacggtgataagagttacacaggagatacagatagcaggcagtgggagttcagagcagagaggagtctgggggatggatgttaggggagattcagatgaaggggagcacttactggctttcctccccaagaggtgccctaggatccatccagaaagatcttgcggagcccacagagtcccaacgggaacttgtgcttcttggatggaccccttacccatactttacccactttaa

SEQ ID NO: 297 - DNA, 441 bp, Homo sapiens
  misc_feature (1)...(441): n = A,T,C or G
actaagagtgttcaaagaagaggaatcacactttggccagcagtatacctgcagccctgcggctaaagtttgctgaatgagaatataagtgggctctcattttgaatataaggaaaatctgtaccagaaatgccaaacaactgaattcaaaatgaatttcttggaactcaacactcaaaatcagagatggttcagagagaaggtatctactgctaatttctaactaaatgaaagggcttctgcttctgagagcaatgatacccggaacaggaacgaaatgctgctagagaacagtgctggaagtgtgtcgacnaaactggcttcttggtctagtctatgccactttccntggataatggagagnccatgctanggggagaaaagccaatcananggcttcagctgggncngnnttaaanggaatacatcaatgggaccggg

SEQ ID NO: 298 - DNA, 593 bp, Homo sapiens
  misc_feature (1)...(593): n = A,T,C or G
gactctggggactccttcttaaatcaaactgaaggaccccagcctttttttcgccccgaaagaattaangtcgggaatgccttcccnanaattnganggangtnccgntnccggggggncatttttctttgtgggggtcaattggggcgggtggttggcaataacaacccaaaatcttgcggaatcttgtggctttttcntcaaaatgggccagaaggacgaacaagcacttgtttccccaaggcatttttaaaaaaaaagttccggagnaaccaaaactggtcncaggagggatgaatgnaaattcactgtatcttaaaggggtgggggnaagcctgatgcccctnctgtattagagcccnccatgattcttacagntnggggggaacaacataatgcccatacatgaanctggcttgggggctttcatttttncccaagaaaccaaggaaggggactttaagtcattncccaaccaatcgctttgggttcangtttcatttcaancttntnttttgggacccannnaattnttgataaaannaancccaagcttctttnttttggggggatnaaataatttaattggcctt

SEQ ID NO: 299 - DNA, 537 bp, Homo sapiens
  misc_feature (1)...(537): n = A,T,C or G
tgggggctcctgctttagtccgaactnggntntngttttttttnaannaaactngggcctngcttttatggtttattgggccaaaaanancttactggggaaccttttcccnaccnccaggcttccccgagancttccacnattgaaaaaggttctagggggcgcttaattaatggatggtgggatcctttaagggagaaaatcaaaggtccccccttagagggacatttgacttcttcgtggcagcagggggggaattggattgggaggtaaagaaagaagctgtgagccccagaatgaattnctggaaccagccccaagaangnggaaaggtganggaaccagattcttagaagatgacttanggggaataagccaggagcttaatccacttctggngagactcttttttaagaaaaaaggngctccaaaatttnccnatcccaaatttaagtnttgaaaagccaggnnttttggtttntaatgnngggaggnaaataatttaaaacatttcccccctttngaagggttaacccg

SEQ ID NO: 300 - DNA, 270 bp, Homo sapiens
gagagaaaataaaagctcagagaagttaagcgacttgctcgagaagctacaaagtggggcagcctggacttgaacacagacagtctgactccaaagccctccaaagatgtaggttaattttaacctacatctcccagaaaatgagcaacaaaggatgtccagccctccagcaaactagtttaagaaagaaactgtctttcttttcttctgtacttgaggtggggtgggggcagggaataaacaataatcatgcatgcgcatgatttaaac

SEQ ID NO: 301 - DNA, 157 bp, Homo sapiens
  misc_feature (1)...(157): n = A,T,C or G
gacgtctggggagctcctgcattaagtcagaaactgagacatggagccttgctatgttgcccagggctgggtctttgaactcctgggagtcaaagtgnatccttccttttttggccctccccaaaagcactggggattacaagatgtgaagcccact

SEQ ID NO: 302 - DNA, 200 bp, Homo sapiens
  misc_feature (1)...(200): n = A,T,C or G
caagaaactgagaaatgcctacccgcaggaaatggggntgggctttttttagccntgctggantgtgaacaactggtggaatggtgccctggcaaccaaccangggaaaagggcaaatggtttattatttaaagggtggaattttctttggtggaaccaaaaaataaaaaataccaaaaattttaacccttttctttttt

SEQ ID NO: 303 - DNA, 284 bp, Homo sapiens
gatgatgaaactcccatggggccagccacagcagtaaccagactcagaaatggacattcttcacactgagctgcatcaacccagggagaagaagaggagaggcaacacgccatattttctaatgagttaaagcctaatttaatctggaaataactaatgttgactagtgtgtttcccctaaaataattgcctctgatggtcaattttatagctaaacctaaaaaagatgatttaggaaacactgagaagttcatccctcttcccacaataaaaatatactttgc

SEQ ID NO: 304 - DNA, 353 bp, Homo sapiens
aggactgagaggagaaaatgagacactgagtgggactcagggattgctccaggccacacagtcagcaggaggcaaagcccagattcaaatgcagattactcagctccacaatccacatcctcacaggaggctgcactccttgcccaagcgtcagacaggagcaaagagaaagaaggcaaccagctggctactttcttcccttcttggatgcctccaacagggtgagaaggactaaacaaatgaccaagtgtcatcccattttggacatacttaaaacaccccatggaatttttattctgactttcttctgcctgtgtggcatttatgtttaaataaaagagaattcaactcgt

SEQ ID NO: 305 - DNA, 423 bp, Homo sapiens
  misc_feature (1)...(423): n = A,T,C or G
atcctgcgnggtgtggctgaacttcccacccangganttgaccagactttgtcaacagccattcangaactggcacaatggactcacagataagattccaggggaagaggacatgttgtcacnaacacttaggacttgaaatcctggcttgtggaggatagcatgacctcttctcagatctgcaaaaatgctgatgggcagattcaaaagagtcaacaataacttcgctctgacttggtaaaaactgcttttggaagagattctgtttgggaaatttgtgggcctgagttaccagtcatctgttcctgccacaataactgtcatcattgcttcgaagcaatgtttggcttggagcagtcccgaatgagctgcctatcacatgttgaccataaaataagaagaataaataactggcacaaactg

SEQ ID NO: 306 - DNA, 431 bp, Homo sapiens
  misc_feature (1)...(431): n = A,T,C or G
ataaagaaccctcttaggatggtgaacagaaacactgaagctgggatagccccctgtcaggggccatttgtcatttccacaggccaagaacctggacgctgtccccacattggggaaccctccaatgcataagccaaatgggaactggaaacacttccttgttcccccaaccccagggctctctctgcctgtcacacacgcctgccccagcagtggaattcagagtccgcgaacgaagcagcaggaactgggcggcagtcgctgtttcaagattcaaaagcaccagcccaaacacaaaaccagtgtgtactccgtggacagaaagttctgagcagcgccggtctagatgaattattaaattgnnnannattctnncaaggngtancccccattggaacccagttttattantncccgaaatatattaaatt

SEQ ID NO: 307 - DNA, 333 bp, Homo sapiens
gaagaagcaccgtgggggactctcactgcaaagaagaacaggaccattatcaacactcctcccctctgttccccaaagtcccctcctgaccgcagcatcaatcttccacgctggcccggccggaggtggtgccactggcagatttaaatgagagcatgaaggtgggacctccattactggattagtgtccttataagaagaggaagagaccagagctcactctccccaccacgtgaggatacagtgagaaggtggctgtctgcaagccaagagccctcacccaaacagaatctgctggtatcttgatgttggattttctagcctccaggactg

SEQ ID NO: 308 - DNA, 349 bp, Homo sapiens
  misc_feature (1)...(349): n = A,T,C or G
ctgggtttccctatccccgtgggcacgctggtgtgccgtgtgttcttgccaatggaatgcaagtagaagcatgtgccatttctgagaagccagataaaacatgttaggcgggctccttcatgctctcttctcctcttctttctggaatggcgatggccaaaagaaccttggaaggcataaactgaagacagcttttaccacgaattctttcaagaagatgtgaaaaagatccacccctcaacctgacactcccaacctggactgttaccgtgaaangagaaataatcatgtatttgngttgcttgagcntttaacccttttngntaaaaggtaaattgcttgagacttt

SEQ ID NO: 309 - DNA, 157 bp, Homo sapiens
gtgaagaaactaagaatcagaggagttctaactgagccatgaggactcgattcctgaaaaccttatttataaaaaacaggaatgggaactaaaacaaggcaacctgtgcaagcccttacaagtttttcatgtattacagtaaaaggtaaagcaactc

SEQ ID NO: 310 - DNA, 217 bp, Homo sapiens
gaatgtgcttgccctccacttcctctctcctcttcctatggggctggaaatatgtgggatttggagtgagccaggttccacaatgctgatgagtacaatatttcaggagacagcagaacagcatgaagaaagaaacctggatctgcaagtgcccagcagtgagcagaccccaccaacactgggccactgcttctggaccatcctaataaagtaatgc

SEQ ID NO: 311 - DNA, 650 bp, Homo sapiens
  misc_feature (1)...(650): n = A,T,C or G
tgggccgtatntaaaaagnccatgtcnacagcnnnnnngcnanccntnatganaaaantggaaaantnagggcctgntnggagcnacccnaaatntttctattcttccgcanctgccnatnactgnnggtagangnncgggagcancatcctatgaagaaaggaactagctcactcggtannnggacnacnatntttnatcctttaaccctcaaggggnagtcattctcctgactgctaaccttacttttgtaagctccttgaacacagatcactaagaattctagaggagctattcccagaagacatacaaagactgcngatccaaatgactcaagaggtgaaatgtaatgtatgctgtggtgtacttctcagatgccttcaccttaggtctgaaatactcattccccaacaatgcctccatgctaaaaagtgttggtaactaatgggtctcaactgagcccctctctaagcattaccctggagaagcccanccaaagggtaccttacccaaagancacacccgtatccctggagtcagctcacattcantggactgntcaaagcccnagcantaaancttgggggcagaaattaatgcaagggaaagaccncttttgaaaaggcccngattncctggggaactggact

SEQ ID NO: 312 - DNA, 541 bp, Homo sapiens
  misc_feature (1)...(541): n = A,T,C or G
ctnaactgatggacttggctagnccgctgccanccacatggagtgggaggatcacggagcctgaagctgagaggccacagcactgcacctgacatatattaccaacttgccatgcaacttcatctcattgactccgcattcccattttttggagtggatcacctgcagttcccttgacaactgagtgtctgtatttttctgtatcgtccagtgtgatgacaactgtctacacaaccaagtctggccagcactgaacacactcagcttccccacagtgctccaagtctcaaagcccaaactgcagccaaatctttggcaggggttgncctctggtcaggccanaacacctttnttgaangacctttctgaacatttttaaaccattcgatgaatgaccctaaattcttggcgcataatttgggactgntgccatcacgccagaaacatttattaaacacttactgngtcagngctcaagacctgccatcttgnttnatnttgacaacagtgatgcacaatanggggtgncatttcccgtttc

SEQ ID NO: 313 - DNA, 295 bp, Homo sapiens
gcccttcctgcttgctcactctgatgatgcaagctgcaaccctgtaagctgttctatagaaagacccacatggcaagtacacaaggatggctttggccaacagcctgtgaggaactgaatcctgccaatatccacgagtaagcttagaaacggaagttctaagctccctactctggcctggagatgatactgaccaacaccttgaatgcagccttgtgagggaccccgaaccagagacccagctaagccttgctcatattcctgacccatgagaacaatgagatgataaatgttg

SEQ ID NO: 314 - DNA, 161 bp, Homo sapiens
gttaagatctaagaacgttctaaatctctgataggatttctttcaagttaagaatgaagagtcaaaaaggaaaaaaaaagaagcactttgccaaagacaaacctgaaccagcaacagaggaataacagtaaaacatgcaattaaataataatcaaatagcc

SEQ ID NO: 315 - DNA, 277 bp, Homo sapiens
gacgcaagctgacctggtgcaacgaagctcccatccaaccaaaatgggccagattgtggttaatggaccttaccaagatttcctacagacaccacaccatcgggattattgattggaagtgtacgccactacacttgactgaacttgaagttgtagactttctcaaatgcttcaagaggcatttgatagcatcattgtttataaacagggaaaaactggaggaaacctaaatgtctaacaactggaaaatggttaaataaattgtggtacagccatt

SEQ ID NO: 316 - DNA, 135 bp, Homo sapiens
  misc_feature (1)...(135): n = A,T,C or G
gtacccagtgcacgtcctgatctccagctctccagcggcttanaacagacacagaatgggccgggaccagggacccaccagagacgtctgtagttaatagctggcgctcttccactaataaagttttattgaaat

SEQ ID NO: 317 - DNA, 562 bp, Homo sapiens
  misc_feature (1)...(562): n = A,T,C or G
taccacgacaacagcctaaccccaactaaggtaaactctgccaccaaacatgcctgggaatggagaagggtctgcagatgagaaccccttctggttctatgattcaaatcttcattcactcaaagcaggaaccaaatccagtgctcctccattgttggaataaatgctctttgcctgaatgctatttgtggtcttcgtagaatggagagtaactgaaggccccaccggaaatcaattttatgtaagcttttcattctctggcctcaagtatttctaaaatgtacctttctatgcaggctacttattcaggcaactattttcangggaagatactcaaatgaaaatagagaatcccttttggccttttgctaatatttcatttgtcaaaactttgatagtctgacaaagtctttaccatgagattggtaaactcacggaagccaaactgtctgggatgcgacttcaactncctacttacgaactncataataatggcctaacctgcctatacctcaanttnccatctataaagacaataaaagccctatttcctcaaaaaaag

SEQ ID NO: 318 - DNA, 362 bp, Homo sapiens
  misc_feature (1)...(362): n = A,T,C or G
aaataacacggaaagacaggcctgttctcccggaactgacagtcggaggggaaaaagaaggaaggatgctgttcgaatacaaaggaaggggatcttacccaggctggatgggagaatagaacatatggtgtttccattctctctccagtctttcaaccccatcatgtttcctgccctggagagttgctttgactatcagagaaggcatactataatggcttagttggagcaaataaagaggcaggaataagcctgtttgctgaaaggaggtggaaaagccgtgtgcagagccattatcagaagtacccactggaccaaggccttccgtggnttccagcanaaaagtaaccttgattatttgt

SEQ ID NO: 319 - DNA, 410 bp, Homo sapiens
  misc_feature (1)...(410): n = A,T,C or G
aaagatccagattacctgaagctgtggttggacacttttgtttctagctatgaacaatttttagacgttgactttgaaaagctgcctaccagggtagatgatatgcctccaggaatatctctgcttcctgataatattctgcaggttctgaggatccagcttctacggtgtgttcagaaaatggcagatgggttagaggaacaacagcaagccttgtcaattttgcttgtcaagttcttcattattctttgcagaaatctatcaaatgtggaagaaattgggacttgctcgtacattaattatgncatcaccatgacaacgctctatattcagcaattaaaaagcaaaaaaaaagaaaaggccagcgaggccaattcagctnggacttaaccaggctgaacttgctcaaa

SEQ ID NO: 320 - DNA, 27 bp, Homo sapiens
tgttttttaagcaaaaaagaaaaaagg

SEQ ID NO: 321 - DNA, 207 bp, Homo sapiens
agacctgtattgccttaacactcccagcaatgaccacctgcaagcttgcgctgcgactcccgtccgaagacatgcgggccagtatgagcggagaggttcccagcaccgtcacaagaccctgtgctattattttagactcacctgtggctgttgacaacaccacacacatgaaatgatgctcaccagaatcaaaatactcagctaaac

SEQ ID NO: 322 - DNA, 400 bp, Homo sapiens
  misc_feature (1)...(400): n = A,T,C or G
taannngatgtacatggactgatcagacttnctgaccttgngacanatcctgccagtaacatgagaggaaatgagaacgaggctttggagcacagcattggattgctcatgcagaacaccacccagtgccctttccctctgtcacaatgaacagccatgctgcaggtgacggctgctctgtcaacatggatccggcagggcagatgagtggatcccccagcggactcatgagagagcaaacaaaaagtccatatgtgttgtgctaatccactgagattgtgttggttgttacggagcctaacctagcctatcccgacacgaggatcagacatgataatcaaatgtgtttataaagtgttggatggaaatattctgacaacattaaaagactctacccaag

SEQ ID NO: 323 - DNA, 197 bp, Homo sapiens
gaggcatgaggaggtgagagatggaaagaatgctgtctgtcatttggagtcagaaggaaaagaaggttgagggtctgccagctctgctctagtggttttttcctgtttcaccttttacaaaatcgagataatcgtttctacttggtagcgatattgtgaggtgtaaaatggattaatacatgcaaaatgcttaaagc

SEQ ID NO: 324 - DNA, 360 bp, Homo sapiens
  misc_feature (1)...(360): n = A,T,C or G
gtgaatggaccctgagagggcccagccatgtgatggaatgagccatgatccctgagtcctcacctcagggagagatgtgcagaagagccacccaagtggtgatgtgctggtaaacatttagtgacccatttgaggtgtggggggaggctctaactggtaacatttgttaatttctgtaatgcatactcctactaaggctgcttttaggcaaccaacgtgatgtcactgaacacagtttggaatggatgcacataatcagttctcatgatccaggatgaaccagccctagcataccactgcccctaacccacatatnactgngcatcnttnaaaaataaacatattggggttaagcctttg

SEQ ID NO: 325 - DNA, 428 bp, Homo sapiens
aataaacctgaagttctgtgcgcaccgaagacataaatgacataaatgttgatggaaggagaaggatttgaggaaggacgagagtctgaggaacaagaaaggactgcagtagtgaaacagcggaagaaacgagatcatttttctcttataaaaattctgtaaacacagccattctttctgtatttgtaatttgaggaccgactggagttattcctgagagggctatgttcctgagagaacaaaattattgtttttgaaactctagagagaactgctctggcaaaagaaatgtatcttttcatctacagccattctgaggtgaaagatctcatgatcactctggactatacaacccacaagcagacttcaaggatacctacaggaaccccagtagtcctgattgatcacacaggccctaaagaccctat

SEQ ID NO: 326 - DNA, 431 bp, Homo sapiens
cagtctactatgggttcataacaaatgagtccccacatttacatcaaactacctcggcctagtccttgtcttcaggaagaagtacatttacactctacaaatcaacaagaaaaactctcagaataggaagcctatgaaaaagctatctttatttctcgttgtgtaagagcccatttctaatcctgacgtactcccgttttaccaagtgcagtggcatgtgctgtagtcccagctactgagaaggctgaatcaggaggattgtttgaagccagaagttcaagttcaacctgggcaatatagtgagacaccatctcaaaacaagcaaacaaaaaagaatcatcacttgagtcctttctcaacctcagaaagggtcattatctcttcaccttacaatgagaaacctcaactactggtcaagcttaacagctaac

SEQ ID NO: 327 - DNA, 90 bp, Homo sapiens
ggttgcagaacgtataaaaacacatgaaaaatgatcacaacagtacttggcacataggaagtactccgtaaatgttggctgatccaccac

SEQ ID NO: 328 - DNA, 212 bp, Homo sapiens
agaactgaggactcagacctgggagaacacgccactgcccagacacgttcagcgacagataaaacagtataacattttgcaaaggcaaattcctcctcttctgctgtagaaaaacttggtttcttcttcatacacactgagtccttctgctcataatgctggtcctaaacaccttaatccaaaagcagccaataaaaagtttttaaaagtcc

SEQ ID NO: 329 - DNA, 256 bp, Homo sapiens
gtgtcagaaaatgccacagagcacagaagacaagaagagctccctgctgcatatattgcatcttccgttgggcacagtttcactgatgttatctgtaaacagaaagggtgagacgtgatgactcagccaaccctccaaatcctgagggtcatctatgctgccggaggcagaaagtgtcactcccgtttcactccccgcagctgtgttgtttggaatttctgaagattttatttttgatgagcaactttgggagacg

SEQ ID NO: 330 - DNA, 386 bp, Homo sapiens
tgatggtcgccccattgcgtatagaggaaatggaggaaaacttggaagtaccgccttccatacaaagtcaaggatcgagaccttcctctccgtgttccagaatccctcaggaaatacgcgcatgccttcgcatctagagcaagcgctgcaagaattcacagaacggccagaagttccccatcccgctggtggcactcactgcgttaggcgctcagcctccagtccgggccgctttggcttgaagacggccgttttccttcctgatacctgcttctagtctttctgcaacttctggattcctgtcattcttatacctgctctgggcagccttccattcattctgcgaattccctgaagcttttcaataaattgcttttctccaattt

SEQ ID NO: 331 - DNA, 200 bp, Homo sapiens
catgcggacaccaccccaagggagcaatcaggagaagcaggcgcgcaaggccccggaagcatatgccagcgtagaagaccccaagtcaaaggtcaaacagggcacttgatcactcaagtcccccgctagacccccttctgcgtgtactttactttcgttcctgctctaaaatgttgtaataaactttcactcctgctcgc

SEQ ID NO: 332 - DNA, 42 bp, Homo sapiens
ttggctagagatttactacatccgtccttggaagaggaaaag

SEQ ID NO: 333 - DNA, 448 bp, Homo sapiens
gtagatgggccagacgagtctaagaggcagctccgggcatctctgagcattgacttgcggacgttccccagccctggagctccatccaggctgggaagagggaggaccgtggagattttcatgagtgtcccagcagtgagaatggactcttgccgggcagacagacacagcaaggctctcctgggtgctgggggaaactgaagctgtcagtgtcagctccgaaagctctttggagaggcttcccaaggtgggatgcaccgtggaccaggctccaagtatcgtcagaactactggaagattgttttcaagataatctggaacaggaagagaagacacaaaagccccagaatcagagcagctctttgcaggaatttgattaaggaaatgagacagggctggatgcagtggctcacgtctgcaaccccaacccttcgggaggctggaggtg

SEQ ID NO: 334 - DNA, 246 bp, Homo sapiens
atccccgctgtttttctgcgtgatgctgattgctggctctggttcccaggaggcgcccaagatcggattaactgccagcttcctgatgcacagccttgttatcagcgcctatatccttgttcagcaaagtgcctctccaccaacttaatgttcttttcaccaccccatttctgcacgatgtagtcacagtaagacacagagtgtgcagtcccgatcccagtgctacataataaagatccagagctc

SEQ ID NO: 335 - DNA, 356 bp, Homo sapiens
gcctgcccatggctgctcatggaacaatcggctagcgtttcctcccctctgagatccataaaagccggcagctcagccagagcagggcagagggcagaggacagagagatgatgggatgacccgctgcagagaggagctaccctcctgctgagagcttcagagacctgcagagacttccaaatgatctgcctgcagagatgagccacgctttccagggctttctctctgctgagagctgagtacttgaggagagggcctgcctaggagccgacctgactacagagaggatctgcccactgtgggtctcttctgttctaacactaaataaagctcctctttatcttcttcacccttc

SEQ ID NO: 336 - DNA, 225 bp, Homo sapiens
cctgctagcagagatgaataacgcgctgaagaagcaagtccctggagagacaggaagagatgagagagacccccaagttgtgtgatcacctccagcacactggagactgagccgtttcacaaggtgtcaaacctacattgcagcctgaaggatgtcttcacttcctcctgctccttcgccttgtatccttcatagatttttcccgcaataaaactttgcatatct

SEQ ID NO: 337 - DNA, 431 bp, Homo sapiens
  misc_feature (1)...(431): n = A,T,C or G
atctttaaattaactaaggatgaggaaaagtttgtgttcagttcaagatcacaatatatggagaccaaagagctgggtgtaagtccaggttctagccaaactgcatcagtttcctgcccttggaaacaaatgaaagcacagagacactcagagaaaagctgccatcagcaatacatatttcaagcggagagcaatggctaacctgcttctttcgggggcccaaaggaatgctgccattggaaggcacttgacgagatgatatgtgtcccagcatcagtatcatcattcccaggtgaaagacgggagagagctgctctgtgtcacaaccctgttcttaatgctactcaataaatttctatctggcttgagggcaaagaacttgacacaatttacttagaatccnaactggaaataataaaaatctttcatag

SEQ ID NO: 338 - DNA, 244 bp, Homo sapiens
  misc_feature (1)...(244): n = A,T,C or G
gctggagtgcnanggcacaatcttggctcactgcnaccaagagaagagggggaaagaangganaaggggnggaaggaagatggaagagcaggagctncaaaaaaactntccgctttgccacctggaatgtccacccaggataaaaagatccaagctcttctganactgncttttgaccttctanaatgcnnagacaggacggngattgtgccctgaaagatcctcccaataaagatctcccttt

SEQ ID NO: 339 - DNA, 378 bp, Homo sapiens
  misc_feature (1)...(378): n = A,T,C or G
gacccgcattaagtccagagaaggcagcaaagctggtaaagaaatactacaatccttctggagaccagaatcctgacttctggatgtgacaacaatctaacaggattctctgatgcagactagcaggaggtatgaacacccctcccaagtcttcctctgccaatatgaaaagctgctccacaaatcttgcccctatacgtagagggcgantgaagagaacactgatctcaatttcaagaagaaactaaagaacatctncagatttttcttctatctgaagagtcaaaactaattaaactgcaataactttctaccttgncttcaaatctctttacgttcaaaacttccattaacccatttcatataatctccactacc

SEQ ID NO: 340 - DNA, 239 bp, Homo sapiens
atggcggccatcaatgttgattcagaagtgaagccaaaacataatttcctggcactattctggaaggaaaataagtgagatagagtaaagatgactacatagccaattagaaaaagcaactaccacctccactccaaaaaagtcatgtaaataacttctagtctgtgactcgtcttcaccattctgtgcactggctttaaaggagcgttttacactcaaattaaatattctctttgctc

SEQ ID NO: 341 - DNA, 308 bp, Homo sapiens
gcacatattcatgtatggtcactttaacgcagtgctaccgtctgagacgtgtcggacaaaggcctgggcagaggggctagaaaccatgtatcaccaaagccaacttctttcccagatttcagaattgctggttcaactgcaaaagtaggaaggcaatgagtaatttctgctctgctggactagattaccattaactaccatcatgacttcagaagatgctgtcacgatgaaattcatttctgctgcctaaccccataataaggctggctgttctctttaagtaaaatgactaagctattgatcttttc

SEQ ID NO: 342 - DNA, 439 bp, Homo sapiens
  misc_feature (1)...(439): n = A,T,C or G
agaatcagaaaatcaggcaatgcagagaaaggaagagcactacctccacagagcagaaggaaatccagggaaaggctggtaggaaccaggagctgaagacagagctgtgcgccttcctggccatcctccttaaatctgagatgggaatccagccattgcaccagtacatggatctgcaatttttttcttcttcaaaggaccaaacggtgaatactttaggcatnggggaccataaagttgctgtcacaactattcatctttgtcactgtagcttaaaaacagccatacacaataggtgtacatgccaaatgggcatggcagactaaaaagactaaaatgacaaagcctctatgaactaggagaagaaaggcagtaagggagattaaacngagctgaaacaaaaagggtgatgcataaaagaaagagttggaaaaagatg

SEQ ID NO: 343 - DNA, 463 bp, Homo sapiens
  misc_feature (1)...(463): n = A,T,C or G
ctaannngattaggcatagaccnaaantgaanactctggatgtggtggctggctncttgtgaagaagaattcaatcagattccatttgattaatctgcattgagatcctagtatgtgtccgacactatgcagaaatacttcactccctcttccatggcagaccacgatgaactagggtttgctgttttcacggcttctgtcactgttggagctgaggctgaggctgcagcaggagctcctctggccccgaggcaagagacatgttctctgcatccccaggggacccaaagcaacttctggtttgggttaaagaggacttgggtgaccccaccctgccagtcatccaccctctggcagccagggcggcagcaggggagggggcagaaggctgccacagngcttctctcccctgccatttcctctgcagctccctctctggccctgtttttcagacctctaataa

SEQ ID NO: 344 - DNA, 352 bp, Homo sapiens
gtcttatttttttctactcatgagccaagatgcagagagtatttctgcagtcagaggagagatggtccttacaaattttgcaattggaaggatgaggcaaaatgaggccaaagatgaaaaaaccaaggcctggataactaattcacagccacacaagtatttagtcgcaaaaaatggtaatagcatgcagctctctctgttcagtgcccttttcaggatgtgaagaaagatatctgtataaatatgagaagtccttcccaaataagtaaagtaactggcataactgaggagctctttggcaaatctactctgtataccaactcaagaaaaacagggaaaaaaccccaatctg

SEQ ID NO: 345 - DNA, 270 bp, Homo sapiens
  misc_feature (1)...(270): n = A,T,C or G
aggcaaaaaacaggacctagatctggaaatcaaaagtggaagcagaaaattgagcaatcagcctaccangtcnagtggggcaacagactacgctcacggattctgctcacaacancgggaataacagaccannagaagaactgcagagcatccctctctcccccgttcacccgtgccacgagcacgtgagtgcatccacaggcagcacccagtctcctgttccactgactccagcgtccactcactgngagcctactaagtggccacatg

SEQ ID NO: 346 - DNA, 236 bp, Homo sapiens
atgggaccatctagttgcaggaaaagaagctcaggggtcctactgattctaccttatgatccttcccttgctactggcaagatgtatgcatattccggatcccaggtctgttgtcccctcatgccatgtggaagtttcccaagactatagagaaatgtttagatgtgcagatgccacacactaattcttagagtttctacggccattatgactaaagggatttttgtatactgttt

SEQ ID NO: 347 - DNA, 442 bp, Homo sapiens
  misc_feature (1)...(442): n = A,T,C or G
gtttggcttccttgagacagaggatcttgctcgcctcaaagaggagggcagtttgcccccttcctcctgactccaagacaaaagagagaagactgaagagtgggatccagggcctctcagagttcacctgagctttcccaagtctggtttgttctctctaccctgctgctactactgcaagtgactttcacaagatgcttctgagcatagcattgctctgctgtgaccactgcagatgtcaagagaatttctgccttttggaacttggacaatattggccacctacccagagagaggagaaggataatccagacataaagggagcttccacccatcctttggatctcntgataaagagtcatatacttaaagagccatcctcacattcctgcccagactgtgagctgcatgagagaggccatgtctcattttggtccatttt

SEQ ID NO: 348 - DNA, 443 bp, Homo sapiens
gaaaggaaataacccccgaagcctttgcaactaaggacatgtatccttcagagaagtgtttactgggcaacttcttcgtgctgtaattgagtgtggccgattgctcacaaagatgtttgcaaaatccctcctgtcccctaactcacttctccttgcagtgtcactctgccaacttctcctgtcggttggtgaagactgtttctcctcccccttcaatatgggctgggcttgtaacttgcttgaccaatagaatgcagagaaatgaaatgcagccttcaacattcaaggctatgctcaaggagtctaaccctgtggatatgctgttgtcaaatgagggagcttcgattagcctgttgaagacacacagacgacccgacaggcaataccaacattcaagatatgcaagttatgctgtcttaaaccatgctgccaagtgaactttt

SEQ ID NO: 349 - DNA, 165 bp, Homo sapiens
agaactgaggtgtttctctccaggatcttgctacttattgatgacaccgtatcaaggcgccagagtccaaatggtcatcataagaaaaactgcacctaacttccacagcctcctaggaggcccagagacatcactgtacttgcctgccatcctatgtggtgctgg

SEQ ID NO: 350 - DNA, 307 bp, Homo sapiens
gtggggtctttcaagccgagatcgcgccattgcactccagcctgggcaacgagcgaaactccgtctcaaaaacaaagaagctgtcattcggccccagatttgtgcctcgaaaccaccaccgtgaggtcgtttcccacagtctccgcggcttgggggctgacaatcctgcacaggaaaactaggcgacattcccaaatcatccccttgacagccctaattctacttttagaaggttcttggtaccatgaaaacgcaaatgcccggtaaaggcagatttaccatgaagctaataaagctctaacctcag

SEQ ID NO: 351 - DNA, 286 bp, Homo sapiens
gaatccgagtttctgcactactggaaccacgcctcccagagaaatcaaggagacaccagaaaaacctcctcaagggacagggaaaaatcacggacaagctttcttcccttctcacctccccctaaaaaagcccagtgtttttcttcccctccagctatgcagctgcacccagcagagaagtactagattagcatcatctgcatttcattccttttcttttgcaatagctactcgcctataataaacagaccttgtgctcaagggagaatttacttccccgtccagt

SEQ ID NO: 352 - DNA, 417 bp, Homo sapiens
aactctgcagttggtgtcagaagtaatggtgatcttgtggactgtttcgtaactttgaacagacaatgaagaaagacactggtaaaattcaataatactctgcattctgctggactaactgctaccacccaggctggtgatccataccaagagactaattcaactggtcctgtgacccctactcaggaagtgactcagcataactcactgcacaaagacagttttgacacctctatgatttcatccctgacccaagcaatcagcagcacccattccctagcccctgcccaccaaactatcctttaaaaaccctcatctccaaattctcaaggagttggaatttgagaaatatttctcaaatatctcccatcctccttgctcagccactctgcaattattaaactctttctctgctac

SEQ ID NO: 353 - DNA, 162 bp, Homo sapiens
gacattgttaccatttacctccactggatatctattttctttcaaaaagaagctgagaaatcttaatggaaatatcaaatttctacatgatgcttccttgtctcttgagctctaaaaaagacaagaagaaaataaaaagaagtatctattgttatttcatcg

SEQ ID NO: 354 - DNA, 235 bp, Homo sapiens
  misc_feature (1)...(235): n = A,T,C or G
acgangntggaaaactgaaagaaaacatatgtcaacgcatgtgtggaatgagactctcaattcactctgcagctactgctccagctaatttagagcagtgatgacaggcttggctggggagacatggccagccctttggaaatgcacattccctaaccatactgtaaaatggtgggttttattaacaatgtatagtgctaacataaaccattaaatgaagcccactcaattctgc

SEQ ID NO: 355 - DNA, 227 bp, Homo sapiens
gcaaagccctcctgttcccagccccaagtcggttaaacccatgttaaatctataggttgaagacctggatcattcgaagcccagagccttgcacagcagcgatctgctccaacagagggtgatgtcatcatccgaggccacacaaataatgcatttctcaccatcaaaaagcctctgaagccatgttctcaaaggcaaaaaataaataaataaataaccaattaact

SEQ ID NO: 356 - DNA, 357 bp, Homo sapiens
  misc_feature (1)...(357): n = A,T,C or G
gatgtccggaagaggcaggtancgtggagacggagggtcggcggggcacaagagaacttccagggccacaagcgactctgcatgaagctgtgatggggacaccgtgtcgtcgtccgtttgtcggagctcacagaatgagcaacgctgcgaatggctctcctgtcagccgggactttagttggcaacagtttatcagtcctgcctatcaactatacaaggtcctggccgatgcaagacgctgagcgcagggaaactgggagggggggataagggaacctttgtagtctctgcacagtttttccgaaaatctaaaagtgttctaaaataagtcaattaataaaaccaaacaagagcttg

SEQ ID NO: 357 - DNA, 369 bp, Homo sapiens
gaacctgctggaagctgttctgaaccagagaaggatgaaaatagctgccaaagatgttgccatagcaactgctttccttcctgacctccttggaagttagtagttgactttgcagttgaagtacttttctgaaggcagaagaggctgtcagccattttatactgacctaactttcttctcttgaaggtgaactccctcattttccagagtagtcaaggaatttctgtgcctctacccatggctttggttaccaactcatccctgggggccttggtttctttctgtgaaatggaatattcattccagcactcaccaccttctaggctggagtaaggctccaactttgcaaatgctggtaagtaaactgta

SEQ ID NO: 358 - DNA, 170 bp, Homo sapiens
  misc_feature (1)...(170): n = A,T,C or G
gnggggtctttctggcatgcgtctgnnacaccagccactccagaggcagaggatgatgcaggagaatnacttgagcccaaggcngtggaggctgcattgaaccgtgatcatactattgnactccagcctggataactgagcaagaccctgtctcaaaacaaaacaaaaca

SEQ ID NO: 359 - DNA, 430 bp, Homo sapiens
  misc_feature (1)...(430): n = A,T,C or G
tgtccttcaaaaggagtgaaaaaatccacagaagtcatctggctggccaaccaaaacagatgctgtgaacaaaaggcctccctactggaatccagaaacatctgtgtttttatggtcaggtctatagatgtggaagccaggtcccacgcgttgggtatggctgtcaccctgaagataccgcagatcgccaacatcacattccccagtccccatctagtggcctccagtggcccatctactgggccagcaggggccaggaaaggagaagagggagaccagtggggctgaaggcactggtgcgtctgtgcaagaggaggaagccctgtgagagggcagcagcctccggactggtacaaagcgattcttctgcctcaaccttncgagtagctgggattacagcaaaaaataaaattatttgcttatcttcaaa

SEQ ID NO: 360 - DNA, 194 bp, Homo sapiens
gaggacccggggaagaaccaagagaagacaagaactgaagttcttccattcccacctctgcatcaccttccctgctttctctttccccagaagagactcagtcaacatcccaaagaccaatgatttcattgttttacaccaaatatccctcctctaaatttttcaagaaattgggaataaacttcttacgcaag

SEQ ID NO: 361 - DNA, 454 bp, Homo sapiens
  misc_feature (1)...(454): n = A,T,C or G
atggaaaaagaatcgcaaataagcataatgtgaagagcatgagctttggaataagcaagcctggaattacaattttcttttattagctctgtggctgtaacactcaacttttgcaagcttcagtttcctcgtctgtgaaatggaataatagcacttacctcattggctgttgtatggattaaatgagaccatgactatggatgtatggcatttggtacccaataacccctcaataatcggcagctataattattcataataataatggtggtagcaacaaacccagcccaaacatctgaaggaccgatcactaaaaagaagatgaactcagtcctacgtagtaacaagaatgtganatctatgttggtgccaaaagtctggangagttgccaggaccagaaaaaaagganggggtgangnccgcctggaanaaggangggacagatgtcaaggg

SEQ ID NO: 362 - DNA, 273 bp, Homo sapiens
actccaattagtctccgcaatgcagtcaagcagatctcatgaagatataaatctcacagccttctctaaaacttctcccactgatatctgggatcctgaggcaagagtgacagaggcaactactcagaaatcaggatccatgatcaaaggagcaacagcagtgtcaaccaagaatgtgtttttagcaaatcttcctacacactccccctattctccagccatggcagttattaacctttccagaatacaataaagcctctgtgattcttggct

SEQ ID NO: 363 - DNA, 387 bp, Homo sapiens
  misc_feature (1)...(387): n = A,T,C or G
gaaaactgctgcagagtgagagtcttctaaatggattaagaagcctatctcaatccctctggagagtcctcttcaattcacaatgaagatgttgaagagcagggacagacatcaacactcctctccccaccttccccactggcagaggcattcaggtcactactagtgtctctctttctcttttccccttctcttaatctctcactgcccttctctccatgtcatattctctttttctccttccctctcttccttcttacctactaaactcnatatgtaccaaaatcagtcaaagctctactatctagctctctttatctagactaaagggagttgtccacctcttggtctagataacacttgcaaataaagacctgctcgtttccc

SEQ ID NO: 364 - DNA, 101 bp, Homo sapiens
gctgagatctgcaaacctctgggtctcaagagatgaaggctacattagccaactaagacgacaaactcaactcttccttgtcattaaataatttgccagtt

SEQ ID NO: 365 - DNA, 443 bp, Homo sapiens
  misc_feature (1)...(443): n = A,T,C or G
aaaacccggagagaggttggaaacaaggtcacgacctaatgctcctcagccgtgcaggccaatgctttgtggcgtcatcagctgcccaccgtgagctggtcaccactttgagtccagttccccctggcaccncttgcctagtggataatatcatacctcactttccagcagagaaaccgagctgcagaagttgaatgaaggtctctagggatgctcttgggtccatcattcattatgtgaaatatgaaaggcctcaaccatatgttcccaagcccctgggttgctgactggcaagaggagagaagccactccaccaagctgaaacagtacctgtccctcacggtggggagctgaggcagccagcaaccagtcaatttttgcaggaccagaagcaccattagaggccttgcttgctgattcatttccatacctcgttgatctcc

SEQ ID NO: 366 - DNA, 213 bp, Homo sapiens
aggagaaagctgaagcacaagatggttaaaaggactgttcaagacagccttgcaattttgaccaaggaagaaagctgaagagtgctagggcaagagaggaactacgtccagaacaattcataattccaaattctcacttccatgatttcaatgctgaatgtgtacttctctagctaaaaatacaattgcttaagtaaaatcatcattatttac

SEQ ID NO: 367 - DNA, 261 bp, Homo sapiens
gctctacttctccaaaagacgttacatattccaaggatcctgcgtctcaacaaaccctttcttctgcaaaagaacagcctgcttttattccaagctctgagattccttataggaagctgtttctctccagttatgccatgttatgccttaacctgggccaacagtgcctacacacggagaatgcaatggttgaggccaattcattaacagggattgtttagccacatccgttgttaattgacaacatgtctatggaattag

SEQ ID NO: 368 - DNA, 455 bp, Homo sapiens
ccatccccgacaaggtaccagacatatgagtgaagaatcatggaccctccagtccaccccatccaccagctgaagaccatgagtaacctgggccacatggagcagaatacccagctatgccctgcccaagtccttggctcgcaaactcattaggacttggattgatggactctctagcctgagactgaggccctccttctaatgaatggggcagaaccaagcaccttcaacctcatatgaagagcagtcaaagaaagtttaaagcaaaatgaccatagggggagggcaggtttgtgtgcagagatggccctgaagaagagtgctgccatggcaacacaaagacagcagacaggctcatgcacttgccaccagtggggttctaataaatgttttggggaggcatggagatggcatgtcttgcctgagtcaacaatcagaaaaaaaaaaagggccgg

SEQ ID NO: 369 - DNA, 192 bp, Homo sapiens
gaacccttgtcatccagaatttcccaaaggatggtttgcagaacaccagtctcaacagaaaaatctgtggaagaagtgccctgtgatctggcctatttggaatactccatccatcttttggaaaattaaaatatttatggtcaagttaaaggcgctgagaagtcctgcagtaaataaacctgtatttacttg

SEQ ID NO: 370 - DNA, 235 bp, Homo sapiens
  misc_feature (1)...(235): n = A,T,C or G
gattaatgaaaataaaacgcagaccttataagcagacgctgtgattttgtaataaagaggggcagcttttacaggaaaaagaacccgagggaagctgttggcagtctgtgaaacgatggtcatggtggaattcgtttttctgcacattagatgtttaaaacagctgnaaaaaagaaaaaaaggccagcgaggccaattcagcttggacttaaccaggctgaacttgctcaaaagg

SEQ ID NO: 371 - DNA, 137 bp, Homo sapiens
agtctagaaaatatgaatttacaaccacagagaagtgaagacagtctcccagattctcaccccgtgtaattgaaagtgattgttgaacattgctgatgaagacaaaccgctatgtaataaactgaataataacttag

SEQ ID NO: 372 - DNA, 186 bp, Homo sapiens
atttaaggattcaatatggactgcctcaaatataaagggacacatttgctacatggtccagagacttgtgttcctggcccagaatctccttgtcctatcaattgttggaaagacactgcctgcatttgcccttttgcctctctctgttctgtacttgcactatcaaataaaaacaatttctaatgg

SEQ ID NO: 373 - DNA, 163 bp, Homo sapiens
atttgtaactggggatcccctggaagaatcgtctggaaattacgaccttcatctggcgattgcagctgttaaagtctccaaagaggccattcttacattgtgttgtgaaattattactctatctcaaatctgtgccagaaagaaaataaaatgtgtgtttatg

SEQ ID NO: 374 - DNA, 64 bp, Homo sapiens
gtatcatcgaaacaggaattccctgacttcagtaatgagtatttataaataaatcactataaac

SEQ ID NO: 375 - DNA, 337 bp, Homo sapiens
aaatcacttgcaaggaagattcagttacccactgctacactagaaagttaggcttctcttgcggcattccacagtgaatcccttcatcaacacctggatcttacaaaatgaagtacctcagcaagctatgaagagaaagggtgttctacccccttctactttctgccacctcaccacaataaccaatcctatcatcatcatcacaactggctccttcatacctttaaggtcccttcaaagaggacatccttgaccacttcccctaaaatatatatccccttccatgagtgtgctctctcagcaacctttctctcagcaataaaattaatgtatcatt

SEQ ID NO: 376 - DNA, 62 bp, Homo sapiens
aaatcatgcccaagttcaaacaacgaagacgaaagctaaaagccaaagccgaaagattattc

SEQ ID NO: 377 - DNA, 170 bp, Homo sapiens
attggagaggatgaaggccctgaggtccaagaacatggaaacctgacagtggacgccaacagctgtggagagaagccgggcgacagctgtggagagaagccgggcgatatgctcacgcttccgtgtgcccagcaatcctgctttatctttttaaataaaggtgattcctg

SEQ ID NO: 378 - DNA, 313 bp, Homo sapiens
cacctaaagcagtgactggtgcatgacagctatggaagaaatgcgtaggataaatgcatgaaagacaggaagagaaaaagccaactgggcacagggtcaaaaactatgaatgaagagagcaccacctaaaagactgctttgcagaatcaaatgccacagagaagcaaggtaaaatcaggggtgaaaaaagaaccgcctgtgtccactggtcacttttgtcctcatgtttccatggcataataagaatttaacagatgcatttcgatggatacaaagaagacattctgggttaataaataacttttgtaatatg

SEQ ID NO: 379 - DNA, 223 bp, Homo sapiens
gcagtgttgtaagcacggggacagagacgtacgtgagcagatggaacccccgaagacctgcagctgtcatcctgggactgtgtgcccggcactgtgctaaatgctccctggggcatctcgtgtaacctttgcaggaaccctaaaaacgacgatcagattagcctcctcctcttgaaaatggagacaaaattcaaataacataaacttcaccactttaaccatt

SEQ ID NO: 380 - DNA, 444 bp, Homo sapiens
atatgaggttgttgtatcctaggaaagaatgtcagcctcttgcatcccctacaattggtgagagaagccctgacctcaatagcatgagaagacctggattctgatgcgagctccactagcagcctgctctcctgactccccagtgatcatttctcctgtgtactctggggctgatacctaccctgtcctcctgctttgcccttgaggactttagatgagcaaaatgcaagagacattcctatgaaagtgatagattgtagaggtaatgaagcttctcttgtgaatatgtgattgtctcttctctcttgtgtgatgctgagacgctgaacagagtaactggtacgtagcaataattcctcatatttttgcaattctggggaaggaggaggaagaggatgatgatatgaaaacgggaaaaagagagaggtgatccctatggtgggt

SEQ ID NO: 381 - DNA, 403 bp, Homo sapiens
ggtcttgctgtgtccctaggctggagtgcagtggtgcagtctcaattatgccagatggctctgaggtccaagtaaaagataatatttgcaaccaaatcactggagttgaccatcaaaactcttttccaggtggaaaagcaccctgaatccagcttcctgctatgaatgaatactgagcttgggttggtggaaattgattttcgagataaagaatccagccaggactgtgaagccccagggaatggctgcacttcaagtcagaaggagcctgggtccctgaatcatcatgtggaaggctctccacccagttcaatggtgcaatggaccacaagcaggaacttaatttaaaaatgtgcttatttttggtagattttgtaattaaaaaatgaatcccactctgctg

SEQ ID NO: 382 - DNA, 379 bp, Homo sapiens
gcactacaagcaaatgccaaatacagggaaagtcaactagatggcagcacaagggaaatgatccctcagtcattccgggcttcacaagggaggatcaggtcaacaatttcccagcactctctgaggatacggaagggctcagaactcctcctcctccacctcctagggctccttccttaaattttgtaatctgcatcacatcatattgcagggatgtgctaagaaacatacagacatgaacacccgaacaagaggaagctgaacaaaaataacttccatcgtacctagaaaaaaaaacttctactatattttatataacagcagaagtctattccatcttctcttctgctttaaaaataaaataatcattttccaatcc

SEQ ID NO: 383 - DNA, 448 bp, Homo sapiens
  misc_feature (1)...(448): n = A,T,C or G
cagaaactgaggttatttggatgaaatgcttatttcttttttaacataagcattgactggaaatattggttattctgtctgatattacatgaaggtcagatgccctccatgcaaccatgaggtcggatggcagtttgatgctgaaccagcaaacaagcctactcagcatgagactatgagtataaaaacctttatgatgacctacctccacttggatcaatgaagagaataagagttggggacataaacacattcaggagagaangaangacccatgttgatagtcacagggaagaaagaacagctcancctaacattacccaagggcnntagaaggcctgtacaaanaaataccancccctgantggaccnnccttntgatcctttggnaccttcccaggctttcccagaanttacaagggaaaaaattanaaattttcccggtttg

SEQ ID NO: 384 - DNA, 278 bp, Homo sapiens
  misc_feature (1)...(278): n = A,T,C or G
gcaggaagagtccctcagcagctattccagccccagtgagaaaccagaaaagatgctgagacgttatgagacagtgaagaccgggatctatcattggactaacacagcaatcatcnttaacatgcagagaggagaggaagacttgtttcatctcattcatgttgcagggagacgccaccgatttgagtttcaaattatggcataatagctcatttatgcaaatcataaacaagattatataatgttgttgtgaatgaaatatacacaccaatctaggt

SEQ ID NO: 385 - DNA, 162 bp, Homo sapiens
  misc_feature (1)...(162): n = A,T,C or G
tgcaaagtaaatgatggcagtgtcctacgtgacagcagggcaacaagatagaaggaacctntcaccgaatgaccatgcagagcaaagttactcatcaggcaatgactactcataccaggattgctacatgagcagtaaataaacttctttgttatttgagcc

SEQ ID NO: 386 - DNA, 447 bp, Homo sapiens
ggcctcaccaagagtcttggcgtgaaggccgacaatgcatatcctgccaggccaagaaacaggaaaaatataaacaccagtgatagagacaggaggcagccaaggacccctcctgcccccaacacctgacgaaatgccgccttcaagcctaaaacagcatgagggatgaaaaaccagactgccggtccggatgaagcccacccttttccccaaatgattctttctgaataacgcccatctgcacattgggaggagggggtggggccttgggaagtttgcactgtttgcaggggggaggagcctggtctctctcgtttctgtgtggtaaggtgggatttaatccctgagatggagagcctgttagcaggactcttatctcactttgctgatgcgtatttcctttttcatttctgcctaataaattccacttgtcacccttcaaaaaaa

SEQ ID NO: 387 - DNA, 303 bp, Homo sapiens
  misc_feature (1)...(303): n = A,T,C or G
gcatagggatttccagctttacaacatgctatgaattatcctcctctgtgttaacacttgtgttaacctcatccgaagtcctgggggatgtcctgttcaacctgccatttcacccatagtagagttggtccacagtgaaaagtggtgaaaagactgaagtctttataccactngcatatattgttcctgatcctgcgtgtacatttcagagaactggtgaataaactctccgctccatgcctttctgctcagagaggttacatcttatattctccaaatttaaattaaaatgtagcttccttc

SEQ ID NO: 388 - DNA, 442 bp, Homo sapiens
  misc_feature (1)...(442): n = A,T,C or G
ccgatcgaatgcctgctgcactgctgaagaggaaacagagtcgtggcctccgggagggggctcaaacctgtgactggtgcatgttcgccattagacacactggctggtgaccagcagccccacctacagaattccctggaatgaggaatggcattcctgagaccactcagcagagactacctcaaaaggcgctgctcaatgccaggaaatgcagcgagagaaaatccccttccggtgccacctctgtggccagcacacaggtcccctgctcagcgggtgtgtgtagacgtgccctcaggaagctcagcccaaggccctctggaagtggccacagctggaccacacggaactcatccactgcttctttggagctccaggaaagcgccagaagangggcactgaggcaganggaaagctaagcagcctgtggctcaaaacatac

SEQ ID NO: 389 - DNA, 111 bp, Homo sapiens
gtgaacattcctgaggaactgaaatatgaaatctgtcaagtcacatacagagatcctgtagatcattcaactgcccatcccaaatcatccaataaaatatgatgcttctct

SEQ ID NO: 390 - DNA, 447 bp, Homo sapiens
gcatactaataagcccagggaagaagagtcagacccagtgccagcgcaggggaaacgcatctaatccagaacagcagacacagctcctctcccatggaacacccagagcagacattgccagtcgatcccagcaccctttccccgggagcctgggctcagcctcaagactttgcctccgcttcacaaagctctgcacagccagttctcatcaattggagttggtccaaaatatggaaactctttgctctgcctgacccaaaccattcctctttcccataacaattctgacatttaaaaacagcagaattccccaacactcatccccgggaaaagaaatttggcattgttggtactttcaactcctgaccctggtcaagctgttgagtcaacttgtggttgagtctgagccccatttctgcagacagaaagaccgcatttgcgtttttg

SEQ ID NO: 391 - DNA, 336 bp, Homo sapiens
agttagactggctgagcaacccaagcttttgtgttggatccataacgtccctgagccaacaaactgaagcagctccagcccatgtttctgaagggttaccgctgacaagtggcaagtacatgacacagttagtgcctgtaattaggccaagagggaaatggcatcattgtgattctcgagtaactttactagcctcattagtaacctttagaacatcataattcaggagtcatctgaaatcagagtcttcagatgaaagtgacactaacaaaaagctcaaacaaacaagtagaaaaaagaagaaagagaaaaagaaaaaaagggagcatcagcatc

SEQ ID NO: 392 - DNA, 76 bp, Homo sapiens
taaccagtgaggaactgaggtctcccagcaaccacctgtgtgaagttggaagcggcgctctctctctctctctctc

SEQ ID NO: 393 - DNA, 443 bp, Homo sapiens
gggtcctcactcagaatgccctccctctaacaaggagataattggagacacagccggctctgggcctgctctgagttgaaagaggcaccaaggaaccttcaacttcatcctcaccctcaggaaatgggaattgttcttccccagttctcaaagaggagaagcagcccttcctagctgggacatgatattatgttcatcactaggacctgggccctgtgtccagctctgccattagaccttaacctctgtgctccacatatgtccaacgagcatgagattatccaccccattatgcataggatgtgcagtaggcagaattctaagatcgccccatgacctctgccccctggtgttactgctatgattatgttatgttccattgcaaaagggattttgcttttgcccatgtaattaccgttattaatcagttgaacttaaaattt

SEQ ID NO: 394 - DNA, 439 bp, Homo sapiens
cttttcatttaatcttgtacctaatatgggacgctggcagcggcagagagccagaccgaccttctaaaaccaagactacagaccacacacatagccttgaagatccgtgaacttctttataaagggtgaagtttcatcaaactaaggaatgaagggaaaggaaagaataaagaaagaacaatgctttttgttttccgagtattctttttgttcactacaaggtggcaatcagatatctgtagcaagcttggatcagtgacgtctgagatacctgtttatggattattcatctgttctacataatgacatctccacctccagacaaaaatttcatagtatgattgtagattcactgtgctcttatctgtatgcagaagaatgggaattgggacccttgccacacacttgtgaaaggaaaataaatctttggggtcccaaa

SEQ ID NO: 395 - DNA, 446 bp, Homo sapiens
  misc_feature (1)...(446): n = A,T,C or G
gtggcatgtggacangcagttggaaagagaaagtacagaaagaagttaaaagtatgctagaaaaaacagtaagtgaagaaatgacagaggtgccaaagccaggtgaagtgaagaggtatcatgaggcagaagtgtcttcctactctgagcgggatcccaggaccagcagcatcagcattccctgagcctcatcccagaccgacagaatctgcatctgcatgtaaaaaagattcccgggtaatttgcaaggatattgaagtttgagatgctgtggtggtgtggtttaaagcttgaggtctggaattagaaggcccatttcaagtatctgtgcctctcattagctatgtggccttgtacaagttattattatttccacccctaataggtagagatgaatctatgctaaacacttagaaaatgcctggcaaataatactatcattcttt

SEQ ID NO: 396 - DNA, 221 bp, Homo sapiens
aagaggaaactgaggctaagagattgaggcactcatccactggcaagtcccagcccagcaggactgcagaggatcaagacttataagaaaaccttcctaacaccagtgcctgccttgtttttccagcgcaaatcatactcaggaagacaaacatccaacgtcatcctctgcttcttgggcccggaagaatgttataaaaataagtaactcatgaagaaaac

SEQ ID NO: 397 - DNA, 402 bp, Homo sapiens
gcctgcactatgtactgctaagtcaatttgtggatttaagtagcaggtcaattctatcaaatgctgctgggtcactgaataaattgaggacaatggcgacaggaaagctacctctgaccttgacaaagcagtttcaatggagtagggtccatgagcagacgagcagatgaacagatgtacagaagagcagagaggcagagaagcagctcagcagagaaggagagaagagaagagtctgaacgtcgagaggagttcagctggagacagccagagaggaggtcagctgtggaacagccaaactccagaggaagatcatcttcccactccatcccctttccagttccccacccgtcccattaagagccaactccatcatccaataaaatccccatattcactatc

SEQ ID NO: 398 - DNA, 437 bp, Homo sapiens
ctatgaccacgaaggccgcctgaccaacgtgacgcgccccacgggggtggtaaccagtctgcaccgggaaatggagaaatctattaccattgacattgagaactccaaccgtgatgatgacgtcactgtcatcaccaacctctcttcagtagaggcctcctacacagtggtacaagatcaagttcggaacagctaccagctctgtaataatggtaccctgagggtgatgtatgctaatgggatgggtatcagcttccacagcgagccccatgtcctagcgggcaccatcacccccaccattggacgctgcaacatctccctgcctatggagaatggcttaaactccattgagtggcgcctaagaaaggaacagattaaaggcaaagtcaccatctttggcaggaagctccgggtttaagaatgatggtgggccttcc

SEQ ID NO: 399 - DNA, 132 bp, Homo sapiens
acatgatatctggagatgcaagaatgcaacaaccatcttgccaccaaaagaagaaaaagatgagaacaaaagtccaagtgctaaggatgcccttttcacgttctgtgaattaagaagaaaagaaaagaaaag

SEQ ID NO: 400 - DNA, 260 bp, Homo sapiens
gccctgggaagattacgtagccaacactggtgtgaaaatcatgcctatggagggttcttttggaacccagaagaaacagataaaggaggtgtttattcatgaaaccagcacttagaagactgcatcagcagttccagctccatgattacaagctcctcgaagacatggaccagatcacacctctcctgtgtggctaaggccaactgcacatgtagaacggtgttccttctatgcttgggacaaataaatctcacaaaatc

SEQ ID NO: 401 - DNA, 292 bp, Homo sapiens
cacagaaaagttaagactcttcagtgggacctgctctggccagtgaaatggaaaagaaagtgacatgtatcacctctagtggaaactctaagagccagtgcaccatttaccgaattttatttcctgccttggcaattgtggatgaatttccatcagcctaagtacctgagcaagcccttctacagacctctactagacatgtagcataaaggagaagcaaacttttgttatattgagtgagacgtatcatccattctaataaaaaaatcataataaaaccttctaaaagatc

SEQ ID NO: 402 - DNA, 194 bp, Homo sapiens
gacagcacttggtggtgttacattgatagcctgaaatcagccatcgtgagagtatttacactacaaatcaacaaacattatacatcagaggttttattgatttgttgactgtctagaccagggatgagcaaactacaagcaaatctggcttaccacctgtttttgtaaataaagttttattggaacacagccac

SEQ ID NO: 403 - DNA, 294 bp, Homo sapiens
acaagatattgctgagatgttgcccagattggtctcaagctcccaagttcaagcaatcctctgaatcctctggcctcagccttccaagtaactgagattacaggcatgtgtcatggtgcccaatttatcaatgcgatgtgtctacaagtggagtggcacattcaaatatttgttgctgttgtcatttgtccattcatttgttgactcagtagcattaactgagtgtctattccaatgtgcagacactatgccaggtgctcgggtggaaggaggaataaaaataatggtcataat

SEQ ID NO: 404 - DNA, 347 bp, Homo sapiens
gtttctttttattgaagcttgaagctcaagttcatggcttcatcaaaagacgcttcaaatcctgaagttgagatagctctcacctggagcccgtgtgttgttctaccctttggctgggaacacagtcacctgggaatcattccagcaggtggcttcaaaagtccaacctgctaggttgaaatctgacactgacacagactccgggagctgccgcggaaagctcaaccaggaacccggaaatgcacaagcctcttgatgcataaaaacagctgggctcccttggagacagagcgccatgggaaaccgggtctgctgcggaggaagctggagctgccatcaacttttcc

SEQ ID NO: 405 - DNA, 428 bp, Homo sapiens
ccaaaggaagcatatacccctggcaaaactgaccagcacctgaacactgccccaacagagaactcaccagaagacccttgagtcgggaattccttcctgtgggtagaacttggtataaacaagtaagccaagcaaggaacttacaccacagcccagttaacaacaggatgcccatgagaacccctgacccgactcagctccctaaccctgtccacaaatggcccgggctctgtgccaatgactaatctccaaagtattcagtgaagcgtctgctccattcgggattttttcagatgggcattttggtttcatcaagccctgctttctcccgctccgtgactttgcatcagttgtcatgaggatgattaaataatttagcacttaaccccctgctgtactccttggcctggatcatgaccacaccgaaa

SEQ ID NO: 406 - DNA, 299 bp, Homo sapiens
  misc_feature (1)...(299): n = A,T,C or G
cctgcattaaacgagactgagggtnagccagctctccagggatctctcagccngggcggacagaaatggatacccaatgttacttgcttggccccctgacctgatgggagtatgacctactgggcagagctcagctcagctaccccaagaagtaaacagcacagagggaaagataaaccttccaggctttccgaaagcaattatcatgtgtggttatcgaaaatttgtattcactatcccgggggaaggaagcagagatacaaataaacccagaattgatatttgcctggggataaatt

SEQ ID NO: 407 - DNA, 418 bp, Homo sapiens
  misc_feature (1)...(418): n = A,T,C or G
atgataacaaaggctcaagaagattaaggaatcggcagatgtgggatgtgcaatttccctatggctcggtagatgatcaagttaaacaggcacgctattatgaaaaaccaccaataaaatgggagaaagacataactgctgctgtatgtggagactgcacctcagccttaatttgacttgccgagcaagaacaaatggacagcacaccgggtgcttgtttagttaccgcggcacatgattatgaggtttccagaaggcatcttcttcacatgtgagatcactcagacttcagcacttggcaatcagatacaaacatgtgcaagttgaactagaaattgtttgaaaaagctaatgatcttgctctagatttttttttttaatnaaaaaactttntgngtccaacngaaatggaataaat

SEQ ID NO: 408 - DNA, 435 bp, Homo sapiens
  misc_feature (1)...(435): n = A,T,C or G
gtccgccaaccatcccccgatccggccgtgtttaactttctttgccagtcgtgataccccgtcagatttctggcgctgccacgccgcccgcctgggctccttctgggctcttatcaacctctcccagtcagtctggcccgccacagctgttccaggccctcagcccctcactttatctgctcgcacagacctcggcctggcaagcggtgggctcggcgcctgctccacataccccaggaagccagctgggaacacagccgccctgctcccggaccctctgagagttcattaccagccagggtaccccagcccgtcagccaaggtgcgggccgcgctgccgagcccggccgncggagccgcctggatcattaaaactncaccctnttgagagaaaaaagaaaaaaacccccncttttaattntaaaaggctttggg

SEQ ID NO: 409 - DNA, 399 bp, Homo sapiens
agtaatgtgcctagaaggagacagtgcatcgaagcaagtttactctcagcatgtcaagaaaacattaaaatattatttgcctgatgattgcattggacacattttgtgaaatacatgagtccctcctacctgggatgtcaagagactgctcttttgctgggagaatggactgatcttttgcatcagctcaacgctgcttttggggagccattttggatacaatatatgtattgcttcctttaaatgggaaataaccatggtctgtcaacaaataatcttgtttgataaatctgacccagatggtgtgctaggttgcaaaaccgtcttcttctgctttggaaaaactcagctctgtcccttcatcccttcctctgccaccagcctctgtccacccccaag

SEQ ID NO: 410 - DNA, 79 bp, Homo sapiens
  misc_feature (1)...(79): n = A,T,C or G
aaaaagtctccctctggaggacaccaaactgtcacgngcccgcttctatnactccctanccagnanggtaaggtcagcc

SEQ ID NO: 411 - DNA, 393 bp, Homo sapiens
gaaggcataaaacggattcacgtataaagttattgcctccctgagttcctggtgctgtgttaagtgctggaagtatgaaggcaaatggaagtgagatttgttcctgtcctgcaagaactgtgagccaggaaagtagcttagaagtgaccaatatgtcaaggtcccatgagaagactgaaaaaaagagaagaaagaggaaagaaaagaatgacaagaaagagaaagaaagaaaccaatatgctctttgttctttgcttttgcttcctcaagcttttctctgtctacaaagccaacctctcctgctcagctcatcagaacattcactccactttctggaatgaggtgttgcctgatcctagaagtcgcaataaagcccactgagatcgtaaaact

SEQ ID NO: 412 - DNA, 325 bp, Homo sapiens
ggtctccctctgttgcccagcctggagtgcagtagcatgattccagctcaccgcaaccttgaccttctggggctcaagtcatcgagattacaggcatgcactaccacatgcctgatgtgagctgaaaaatttctattgcctggtgacatcatagtcattgtaacaggtgttggtgtaaagacagacctacagatgaatgaaacagaacaaaaaatccccaaatagaaccgtaaatgtatgccaattgatttttgacaatggtgtgagggcaattcatggaagatatgtataagaaaataattaaataaaccttgctcaatccatg

SEQ ID NO: 413 - DNA, 209 bp, Homo sapiens
ggacgttctaacataccggaaagtgtggcatcaactaccttgaaattggacaaattcagctttggaggtgctaagctaactaaatccattccaatggaagccagcccacattgcagctgctgaagaagctaccctgactgtacccaaacactcaagcaaacgctttctggctgactaaactgaacagtataagaaaccagggtgagcac

SEQ ID NO: 414 - DNA, 444 bp, Homo sapiens
  misc_feature (1)...(444): n = A,T,C or G
tagtgtctccaacaccatcttgaaggtgcagtgacttgcatatagtaggtgcttgatatttaccaagtacccctgtgggtcaggccctactctcaccctaaggatacagcaggaagcaaagcagaggtggagaagatcccactaaacacacaggccgcttggaatgttgggccatctgtccttttgacatgaattttccctgtaatgggggtagagctggtaactgttggatcatttgattattggagacagaagtcctgtcacttgcccctgctgttaggaggtgggcttcctgaatggctttctgtatacatgaagaatttcaagaccttccgttaaggggggcaagagctaaagtttcagcgtttacaaagaagnctcttggctgactttgctataacttacagcacctgacgtttggacaccttttctttttttggtttt

SEQ ID NO: 415 - DNA, 558 bp, Homo sapiens
  misc_feature (1)...(558): n = A,T,C or G
acactcaagtttcccacacatgactggatggccctggccacactgggaacggaatgggggcctcccattggaactcagggtggagggggaagctcgaccagctattgtggcccccacttccattgacaaaatgtggtggtgagacttgctcttggatgctgtcaggaagtatcatctgactgcgtttgctaccctgggggagacaaacaaaacttgagtgaaggaaaatgagaactcacctgaaaccaagaagagtctttggaaaaggatttttgtggacctcatcaaataaccaggaaagattaatcacctgagaagagaagagactgggaatcttcaccctgcccagacagacttttcatctattctcctgagagcagctacaagagattacctgtgggactcaatttgcataataagatganctttgtttctgggcaagttccacccccanctttccataatgnctggctnccacctnccaggngcattatttttncctaatgacttactgctcctaaaanaaagnntacctttccatttcttcttcctatggaa

SEQ ID NO: 416 - DNA, 232 bp, Homo sapiens
gggaatgaagaaaagaagaagacaaaaatgaagacaaagaaggagaaggaggagaaagaggaacggagacggagagaaagagagactgatctggactcatatcgcctggatcttgaaccctgactttttgctgttattgttgttctatatgacattgatcatattagtaaatttcctgtgcttccatttcctcatctgtaatgtgagaataaaaatagtaatgctgcttttg

SEQ ID NO: 417 - DNA, 404 bp, Homo sapiens
caaattgcagagaatccatacatgtaaggaccgtgcactaactgattgtgccactggagctccatggaacccatacataaagcacacctcttctcttctccttggcatccaacctgctggctctacaactactttcaacaatgagtcaaggctgtacctggcaagatggaaattcaaaatcaacaacgaaagctatttattttggttttgatcctagccctgggccttttactaagtattcagaactgatttaatgaatgaaaaaatgaatgaatggtatacatttccattgtctattctgcttcttttccctagggaactgtgttaggccatgatttccttgctggttttttcatatgggtggtttattggcacacgcttaaattaaatcactagttccattc

SEQ ID NO: 418 - DNA, 443 bp, Homo sapiens
  misc_feature (1)...(443): n = A,T,C or G
aaagttgaaagtagctgatatgggaccacagaatattggccaatcagcattgtcttaattgaggctctacttcaaggaaacctgatcccagaaaatgcctaaaaccaaaacagagagtatgtggcactttttaattttttcctggaatcagtggtcataacccagtttactgtttgtgtgattctaaaattctggattgtggattgttccttccaaaatctgctacttgtttgctgcattcaattggaacttaaaatagattttaaatccatcctggtaatttcagaatcattcatttcctgtccatctcgtcacttattggccaagtttccagtcttaacactgctctactggagtaaaagggaacctnatgggtttggccanagggggaatttagggccttacagcttatgaacctatagggggggnggatttataaggca

SEQ ID NO: 419 - DNA, 971 bp, Homo sapiens
  misc_feature (1)...(971): n = A,T,C or G
ctggggagcctacnctgcattaagtncagaaacttgagnacgcncactgcnatncttngnatgnacganccttagggaagcggcggcgaggacactgacactatgcgagaaggcgtacatactgctcaccgtagatgcacttctcttggtatcttttgttggcgtgctcgtttgggacgcanacatggaaccacaanaccttagctgtatccccttctatggtttctccttcgaagtaccttgcacctctaggacacacacatggggacaacgatttcctacaaacaccacattatcttttanatatttcnaggtgtcnaanaggaaaatgggatacgaanaggccccttgcatgggacgacacccgaaaaggncgcaanangacccaaantacggccnatttggccccccttggttngaannnttttngncaacncccttaattaacgnacccccncnaggaancgggggcccnttggaaaaanattntaccnttanantacgnaaaanncccnccnaaacacaccttanaggaaagncatagtaattggncctcccctttgactcccccccatctccctnttantacttttgggattgggaacntattnttcccccatcgccaatcgaaaagaggcggaaaagggttgncttattanactngggggggcccgggggtcncctttttgggccccgttttaanaaagnggggaatggggaaccggtttttaaccccctttgggttggggaaaagggnaaanngggaaatttttncccnttggggccctttccaattttnccttnggggaattttcnggaaaaaaaaacccaacccccgggccccaacctttggaaaagcccaaccccctttttgggngggaaaccccccccccaaacntttccctttgggggcnccggcccccaaggaaagaaaaacccaaaancccccccncncccctttttttgggacc

SEQ ID NO: 420 - DNA, 307 bp, Homo sapiens
  misc_feature (1)...(307): n = A,T,C or G
gaaaatgcgtcacccatcaatccaagccctccaagaatgtcaaagctcctccttgaatcatcttgtcctgacaccacctggctcccagggcctntgggcagctgtggctgtgcagcccctgcttttcacctgtctcctgtcctggagtgctcgntgcatcttcagtgtgttagttgcaccactcctttaagagaggctcatgccttaccttatcccctcaatgactgtcttatttttgtatgcccctaagagcagagcatggggctagagtggcaggtagtgtttcaataaacacttgttgacttac

SEQ ID NO: 421 - DNA, 275 bp, Homo sapiens
tcctgaattttctaggatggaaaaagcaagaacttataatagccgctctgtcctgaacgagactggagagtgtgagaaggcagctcgggtgccagcactccaggtgccagcagacggggctccactgaagacacgatgctgcaaactgaaaacaaaacaacaacagcagtggtctgagaagagcactgtcctcatcatttgtattataagagtacagggttttcccccatgagctttttagtgaccataaaagaccgtttaatactgcacagttt

SEQ ID NO: 422 - DNA, 440 bp, Homo sapiens
  misc_feature (1)...(440): n = A,T,C or G
gtgaaatggttgtccataaaaaagtggtgagttcagccgaagaaattgctcgtgtttttcctcaagacagctatgaagcaaaagtgcttcatgcacagcttccattttgtcacaaaaagttgtgtatgcaagagttgagactgaataaaattaattcatacagctttgtcagggacattcttaagtgaaactagcatctgtattttttaaagcaacaagtacatggtgacactgaagaatccaacgatggccacggcagcgtgccgccacttccctccacccctgccaaagctccagcaggttcccctctgctgcttctgcaccctcagtgcacgcatcacttangagccnaccncactttntaagctttttgcncatntaacctcatacaccagcctccacaagnggccttgtttccatggagacagttgcccagctga

SEQ ID NO: 423 - DNA, 229 bp, Homo sapiens
cagggagataccagggctcgtcatgggcagcaatgactacgatggacaagaagatagaggccctaatcctaattttctgagcaccatggaagccccctggattctagggagaccttgaggagaaagaagactcctgtaaatgcctgacattgaaattcctgcaagtctaggagcatgtgaactcaaaatggaaattaatttgatgtaataaaaataaagaagaagaatt

SEQ ID NO: 424 - DNA, 100 bp, Homo sapiens
gagacaaaaccagactgacaagctgaagactcaaacattaatcaaactgcgctccggaacaacctttccctcgcattaataaatacatttgcggcccctc

SEQ ID NO: 425 - DNA, 393 bp, Homo sapiens
actgattcctgcatagccactgaccacagcttctggaacaacaaaagcattgaatcattaatcctgaatgtggccaatgagcaagagatgaggaaatctacccagttcatgaccacaaagcaactcaccagcagctggatggcctgggtagcttatttctctggagagactcttagacagtgactcctgatacagagatgctgagactgcattttgtgcctggaggagagaattaccacgtgtgatttgagagcatcagtgttcctccagaagagacatttctaaatgctgctagtgcgaaaaatgagcttatgttcacgtagcccctgggggaagaaaaacagtaatatttaacagtacattttaagaaccaataaaattatttttaaaatc

SEQ ID NO: 426 - DNA, 461 bp, Homo sapiens
  misc_feature (1)...(461): n = A,T,C or G
ggagatgctgtcagaagccccactacggaaacatcccaaggcctactattacctaaggtgacaccactcagctgtgcaggctttctccctgacacaggaaaccattcgcagacattacctcatcgctctaatctcctatcaaacctgtgagacaggtaacagaaggtatcctcaatttacctgtggggaaattgctgcccaagcatcagagcttcccactctgcaaacactgcaagtgtccctgacaccagcacagactaagaagtgggcatctctggcttattctgggaccaagtgctaaactgcaaatggacctcctctctatcccaattcatcaggggagaaaaatctnggttaaaaaggggngccttnttttaagcagctgtctcatttaaggncatccgacttgggcagcaattttagtactttacaagccaagtatgtttgcagaaactctagca

SEQ ID NO: 427 - DNA, 383 bp, Homo sapiens
aatccatcatgatcctatgtgggttctgcctaaggaagactttcaaggcaggaggcccttgaggaagaacagaatcatcatgtcatcatccagggtcctctatctctggcaaagactggcctgatgaatgggatcagagctggaggcctgggtatcttttgactgcaagagttaggggtggcggggtcgatacagtcctgcggcagccaagacatccccaacctgtccctgaataacagacaagtctacatttcctgaaattctgtatcactgtattggcaataaacacctagagaagtaagaaaggaggagctcctacaaaaaaaaaaataaaaaaaggccagcgaggccaattcagcttggacttaaccaggctgaacttg

SEQ ID NO: 428 - DNA, 573 bp, Homo sapiens
  misc_feature (1)...(573): n = A,T,C or G
ctcctgctggtcttgaacacctggcctcaagcgatcctcccacatcggctttccaaagtgctgagattacaggttgtgaagattacagaaatctgggatggcttatgggacgcttctcagccctaagtacgaaaacagcagtgaaaatggcaaccaaaacatcacgcaggactgggggttttggggaaacagctcactttagagcagtgcagtgtagagctttccgtcttctaccagggtccacctttaacactgtttatctgaaaattttccccctggcttactcgcttgcagctgcccactttgcagaaggatggcgctccgatctctacgctccctgttccttcagggactccatagtattttttttcacgcgtcgtcgctactacagcagacgcctgcgttctcattatttgctgtacagatctccggtgccttgactgtaaacaaaacactttanatcattgtgaggcgatgtaagcacagcctttctgctggcagccagacttcttaagggggggngactgngacttgcttacttttcgagatcacaaccaccaagcgacaaaatgg

SEQ ID NO: 429 - DNA, 372 bp, Homo sapiens
  misc_feature (1)...(372): n = A,T,C or G
tgttctagcccagtctacagggaatgcacagtgagggtttttgtgtcctctgcttcaccttttgatgtnagagggccaaaaactccaccctcaggtcgttgctaacaccaccatttttggaacatgagtnctgtggagatgtgnagaagctccattgtgcttatgcatgtttctcctttcataaatatncatgactcctcccatatcttattcgaatatagtatagttcatgccaacctgctnaagcangaatatcctgatcccttngctcctcccttgaaatgcctagtttgctcggcttcaagantaganaangctacngctnggcgnngcatngtcattaatncncnacccctgnaaggggggcaaacc

SEQ ID NO: 430 - DNA, 426 bp, Homo sapiens
atgggaaaactggagcccaaaggatggaaatactgaacccatgggctctgtcactagactgcatcccagggcctcaacgtaatatattcttaatcatactggggtaacctattagaaagaaccctgtcctggaatcctggaaaagaggccctgctaggagctgaccttggacaaatcactcccttctctgaacctcactgttcagggggctgagaacagagggtccctaaggaagagtgttgtatgagaacagtctccgctcttgacccaagcaaacctggcttcaaatctcaactcctgtggctgactagctgtatgaccttgacctttctcagtttcctcatctataaagcaggattaataaaaggtacctatctaatatgactgttctgagaataaaatgaaataaactacataggtgatttg

SEQ ID NO: 431 - DNA, 349 bp, Homo sapiens
  misc_feature (1)...(349): n = A,T,C or G
ctgcttcctctggtcattgatgtgtcagctcccgctgtgcatcanccctgctgctccccggaagccccgccttgcaaatcacaaaatgtacccagcactccctcacccagcctggattggcaatggccccacaggacacatgggaatgatgatctttaagtctcagatgcctcatgaataaagtggatgtgatggtgccaaatctgactgaaaagtggggaatcagctgacctttcccagggattaaagcatcacctgctgtgcaggggttttgtgatacatgaaggcggtagtgcatgtacggtaccaggagtaacattatgtnattttaaataacaagataagtgct

SEQ ID NO: 432 - DNA, 370 bp, Homo sapiens
atgtttccaaaaataattcatggaccttattaaaattgaaaacgttgctctttggaaaacattgttaagaaaattaagaggcaagcctcagattgagaaaaacatttgcaatgcactcatttgacaagttaattggataccaataagcaaggatttactatgtgttggaaaggaaaacattctgcgccatacttctactaaccaactggaaaaggcatacaattgaattgcgggagaggaaatatgatgaccaaacttggcaagggaaaaaagttagccctcttggtcaacctgggcaaatggagaacatgcaagagacttacgaggatcaaattctcaaatctttcattgaaataaatcaaatgagaac

SEQ ID NO: 433 - DNA, 138 bp, Homo sapiens
ggcagagctcctggaaaccagcatgaaatactggagtcgttaatttcctcatatgaaccagaaacaattttactgctaggaaatatgactgtattatacacaggcaatataaaatcacaaccacaagcacatatgggc

SEQ ID NO: 434 - DNA, 394 bp, Homo sapiens
ttttgaagactgggaagtccaagatcaaggtgctggcagattcagtgtctgattctcctggtctcatctgtccttgccgccaagatggattatctgcaggaacttggaccaacttcacggaaccttccttatgttctgttcatactgcccagacctgccctggcttccctgttgctcctgaggcagaagaggcctttggacttactcggccccacatctgtacagtccagagatgctgggggaattaacaccacaaaaggttgactttagatcaatgtgagacaagtatttcaactatgattgtgtatttgtcagtgcctctttgtaattctgtgagttttttccttcatttatttgataacatactgtataataatgcacattttaaattctc

SEQ ID NO: 435 - DNA, 463 bp, Homo sapiens
gaacatgtctggcctgatttgaagctgctacatctgctttgaaagaagccacataacctttgctgctacttcatttcaaattttcctttgaattttctatttcctgagctgggagaaatgagaggatgcaccctctccctttctaacaggcccttctcacttgctctgatgagtctggctctcaagtgagctgccctgatggagaggcccgcatgtccagaatgaagcataccttctgccaacagccatcaaggaactgaatccttcctacaaccacgtgggcaacattcgaaggaaatccccccctagccaagctttgagatgactacagccccagtgtacacctccattgcagttttataaaagacctgagacagaggacccagctaagccatgggctagccaggatttcctgacctataataactgtgaaatagaataataaatgttgttgttgtaagtc

SEQ ID NO: 436 - DNA, 450 bp, Homo sapiens
gcagcacatatttcccatagaaatgtggaatgtaagaaaggcacataaagcaatccaagttgcctgcagatatccacagcctacttcagtctcagtaatgctcttttaacctggctatatggagagttgacagaaaatacaggatcatcaatcaatgatacagtaaatacagaattcctcacagatgatgaatgttgtccttcagcttctgtggtcacttccacctttaactaaagttggagttggaagaaaggcaatgtgactccaaacttcacagtacctccatcttagacaaacacgactctctccttcacctgcgtgccagctgagggagttctgttccattgctgtctccggggactctgtcagtatatttgatgtaatacttgtttctgtccataaaacatgtgatgatgagaagatcgcagtgcagatccaaaatcatatgct

SEQ ID NO: 437 - DNA, 415 bp, Homo sapiens
aaatctatgcgaaaacaatacacagttctggccaaaagaagttaaaacaaatgtgaaaaataagcgacatccagaaacttcagcagctcccttctgtcctatgcctcaaggtaccagagagggaaaaaggcccccaggagaggctgtgaggaaacctgaactgcaaacccaccacgatgtcttcctgggaaaggcaagttggtaaagaaagatgtgaactctatttcagggtagtatgtttttttcatttgcttccaagactttgatggaatgacttgagaggaaaagttcacaattactagaaagaacctaaaaggacatgagagatgaaaccgttgcagtatttttgaaataaatgttttcctgcaagagcagagtcaaaaaaaaaaagggccgggggggccatttcagttgg

SEQ ID NO: 438 - DNA, 471 bp, Homo sapiens
  misc_feature (1)...(471): n = A,T,C or G
ggcctctgaatttttgcatggctcatatcatcctagggaaaaacaagatatttcctagcttcccttgatgctggatatgtatgggcaactgagtactgaccaacagaatgtgaaggaaagtgacaagcacgcctcccaggactcatcttaaaagagagaggacaaacgcctatttcctgctcccctactcaatccctctgcccggaacaagaagatactgagctttcttggaccctgtggatgagaaatgaacaaaaatacatactaatggagtttaaaatcacaggttccatcttctaatgagcctatgtttatttgcctaagtagcataacagtaattgttccagaatgcaaaaatgtacgagatgtactctggaaatggaaaaatacttttcttcaattcaatgaacagattctgaattttaaacaacccaatanttttttaaaagtaacacacctagcaaagaataa

SEQ ID NO: 439 - DNA, 647 bp, Homo sapiens
  misc_feature (1)...(647): n = A,T,C or G
caccagtggctctgacagttctctctcagatggtcttcctgttcacctagcaaacatagcagatgagaataagaagccaggctttacagtatcatgctctccaaagagaaccataaactccagccaagagccagctccaggtatgaagccaaactggcctaggagcagatatcctgccacaaagagaggctgtgctgccatggcggcatacccatccttgcacatatacacatacccgtaggtgagcctgggctgtgccacacaagcacttcatcgggggttttgagattagacacattttataatgggggagatgtatgactgggaactgcatttacttgtggtatactgtgttgtgcactcatgcactgaccttacactttgtacttacactgtgggcatgtggncaagatgcatacctcatgaattcaactattttttcataaaatgaaattttattatgatgtgnaaaaatgctttatcacaaactgaagtgtggtctcatgggccactttatggnagcacagatatacctcattttaaccaatagatattctctctaaaattatgngcaaatcaattttttaaaaatcaaaatctatgttaaacacattttggcaggggggctataataaaaaaaaagtggt

SEQ ID NO: 440 - DNA, 248 bp, Homo sapiens
aaaatctccatggcagcaagctcagctgattggatgggagaggaaatttgaggctgggagacctcctagaccacagctgtaatcttccaagaggaaaggtacttacagaattgccaaactactgtgaagacaagactaaacagtaacaaacatctacatttgtattattactgtaatagctgagttgcttgctggttgaaaagtaagggacaacaatagtttgttccaataaagatgatctaactgcc

SEQ ID NO: 441 - DNA, 192 bp, Homo sapiens
gttgactgctcatccattagcagcagatgtctctcgagtagctgaaccacaccaagctggacctgggacttgaggagcccccttcaacctctgccaggacgcacgctggattagcatctgctagggctgccgtaagaaagtaccaaaaaataagtggcttaaacaataaaatattgtctcacagttaaaaac

SEQ ID NO: 442 - DNA, 369 bp, Homo sapiens
tgcctaagaccagacctcgagaagcagggctaatgaatgaacgggttccccaaccttgggtgaagtgatcagaggagtagcagaacagagcaaggaagccagtgtgacagagaaatgaagagatcaatgccacaaaattaaagagaacacgggggtcgctcattccaaatcccccaccaggaagcccctatcaggaggggaggaggagctcctaggaactgaacttggacgcaggccacttcagctagagaacatttctgaggaacaccagacctcgtctccttccgggagcgggatccaacacctggccagacatatcggtgctgaacaaaagtgcactgggggatgattttaaatttcttctttatt

SEQ ID NO: 443 - DNA, 442 bp, Homo sapiens
  misc_feature (1)...(442): n = A,T,C or G
atgaggaaactgagacttcaagggtccaaatatcttagtgttcttgagccaaaggtgctgagtgaaggagacatggtccctgcccttgaggagctggcagtctttctggggggacagatggtgagcaggagcagtgcctgccactatgcatggttaactgagctggaggaccctgtgcttcccgcacctcacaggcggagcagcctctcaggaaccccttccgaggcttccacctgtgggcatgctgctttctcatcactgctgctgctgacctttctccccagcaactaccaaaagcccttttatccacagtctaaacaacccagaaaaataanggacccccccanaaggaggatgaagagcagtctgtactcaattttatgatcagtaaataataagaagacaagctcctgctgggcacttagttcaacagcagctcctc

SEQ ID NO: 444 - DNA, 658 bp, Homo sapiens
  misc_feature (1)...(658): n = A,T,C or G
gcccccggggggggncggnanttntggccttaaangnggggggngcncccccttncncccttgggaaagggggggaaacnccccccctttggggggnnagaaaaaaggggggggggggcntngggaaaggcccctttcccttttttttttttnnttaggaaanttttaaatnggggggaaaanggccnggaaaaaaaangnaccnttcccccaaanccccaangaaaangaaaaaantttttgggaaaaaaaatgggaaangccccttaaggggaggaaaaattttaagaaaangaaccaacccgaanttantttttgcattggaagggacaccggggaagaagacccaagccntggccttaaaaaaagaacctggtggctttttggcantttgccaggcaaaaaccaagccccattggcctggatggaaatttttggacctgggcccttcaagaaactttcaagccaccgccaccaaggggaacttcttttttcaccaagtgggggcacctttggnccaaattaaaaaataagccttggcttgggttattggcattcttcttggaccttttttctttttacaccttcnttcntggggnggggggaaagggtaaatttcaccccctttttaagccaaaccttttncccatttcaaacc

SEQ ID NO: 445 - DNA, 454 bp, Homo sapiens
gtgacgtacccacaagaaaagagctcttatgctctcctctcttcgggattgctgatatggtcattgatattgtggattttacaaattgaagatttgtggaaactctgcattgactctaggttccacctcatcattttacagaagagacagacatgcaattaagatgacctgcctggagcccacaatattagatcatttcctcatatagtatgaatttgacaaagttcacagaaaatggaacatactcacagggtgccatcaaaacaaaaaggctggctcagaatcaggtcaggagatctccttgtgagcccatgccaccagagtcttgggtccgacacagagctgtatggagtcttgcagaagtggctgctcttggcatgcacaaagacccaagagctttgcatactctgaccccggagatccccaatgaatgtgtctgcactcaagcaagaca

SEQ ID NO: 446 - DNA, 444 bp, Homo sapiens
  misc_feature (1)...(444): n = A,T,C or G
aagaatctaccataaaaccaacagactcctcctgatctctacctgtgctgtctgcctctctagttccggacactgagagctggtgccctgtggccacctcaagctggaaccctgcaagatcaccaagaagactgcatgcctcgctctagccttcctaagggaaagtagactcctgtttttgaaagaaattacctgatttcaagagaaacataaaggactttttttcccttaacattccactcgtaaaaatgaagtttggaagaacttctgcaaactctgagtgttttggtcaattgaccttttactgtactaagcaaatctgaagccacaaatacattggggaggaaggtatacccttcacaaaagatccgtcacttagccagatctctgntgcatgcttctttaaataaaagccatttctgggatattttatttatttatttt

SEQ ID NO: 447 - DNA, 272 bp, Homo sapiens
tcaggggtggccatgtgaccaggtgctggcacacaggacaggagagtatacaatgtgatgaccccacaagccaccaaacaagccctgaaccagccaccaggaggactgaaaaagctgaagtcactataatctgggatctcctgtttcagcagcttagtctgtatcctcatcaatacagtgtatctaagaaacttaaaaacctgtgctttactctccataggctaagaatcatccagatagtttgtttactttttttttttagcacattacat

SEQ ID NO: 448 - DNA, 288 bp, Homo sapiens
ctccactttccagcctcccttgaccttcagttggagccatttgactggagtatgaccaatggagtatatatagaggtgctgctgactggacacatgaccagatgcaccatctcttttccccttctgtggcaaccacagaggccgcacattacagagcataacatgaaggaagcacagaagcctgagtcgctgcttgaaggagaaactcccagggggccaaataaccagaaaattctaccttggattttgcttaaataagaaataaatctttattgtgttaatccactg

SEQ ID NO: 449 - DNA, 481 bp, Homo sapiens
  misc_feature (1)...(481): n = A,T,C or G
gagtctctgcattangttggacaagctcttctggaattatcttctaagtcaactgtgggttgggtaggnggctctgctgatttttcgctggacttccacatttgggacgaagttggctgtcatcaactctagaaagggtgnggccgntttacattggctggtttcccacattctcaagcaatagagatgcggnttccccatgttggcccggctggnctttgaaancctgcctcaggnganttcacctacctnanctttcccgacgtactggggtttacaggcatganccccccgtncccgcccaaggangggctcttgaganaatttcattttcttggccctgctgaangaangnctacgnttnatttaaagggcctgcttgtgggaaaaccaccccccaaaagttgctgnnaacaanaaaaaacctttttngnangtcancaanaaaaactttncnccttttgnatngggggctttttgg

SEQ ID NO: 450 - DNA, 397 bp, Homo sapiens
  misc_feature (1)...(397): n = A,T,C or G
cagggaagaaccagttgggggctggggaaaccagtgttttctggagaaagagaaacagctgcttaagcacgagtgtctgaaggaagtcctgttccctactgccaacccacgaggcatgaccacagtccagtcgcaggagctgctataacaagatgacaaggaggcaagactgattcactactgattaatgcctgttgatcttcaacaatgggccattccaacaaatgcaagaanggaaaaatcactagccaataacatggggatcctatcctataaacagaaaggaatcccatggaaagaattctaattttatctatttaagcaactattggttactcatgcaggttcagaaacagaggggactatgagtcaataaatgatgtaaagggttatcacc

SEQ ID NO: 451 - DNA, 432 bp, Homo sapiens
  misc_feature (1)...(432): n = A,T,C or G
gacacagtgagctcaagaaaccaccaaacacanagcanaaacaaggattngaggcacagtnccacactttctagctatgagagcttggccaagctacttaattctccagccttatattttctcggctaaaaatatatggggcaagtcttgtgaagatgcaatgagataatggatgggaaagccctttgtgaagtgtaaagcaacacacaaatgcagaaataacaactaacagaaggctcccaactggaggatcatgtggaaaaatggaagaactgagactatcttctggccatgaacagaaggagaaaaggatgctgaggacacacttcaaaatctgcatatcctctggttcctctgcttctctaaaaattgcaggaataggtgaaattgagcctgtctgttttctgtaattagtacttcatttttgttttg

SEQ ID NO: 452 - DNA, 416 bp, Homo sapiens
  misc_feature (1)...(416): n = A,T,C or G
agatatgaagtgagcctggctcctcactaaaccacctccgggcacatgacgcatcccaggacaccccatgaagaggggccagggcagagctggtgggggactttgattttttaatcttccagcactgacaagccatcaagtgcccaggataacagcacctaaacccaaggccagaagatgccatttgcctgatcaactaaaagtagatggaaagcccagacttagcctgactccattcattggctactcatggctttccttccaagactgacaaattgcggaggttcaacttatatgatttcctaatacaattaaaatcactcgagggagagtcctcaaaaaaaaaaaggnccnnggggcccanttannttgggattaancagggngaaattgttnaaaaggggggggccccccca

SEQ ID NO: 453 - DNA, 148 bp, Homo sapiens
gcacaggtggcatgctctggcggcaaggtgctctacaaggcctggcaataaggaagggtccagttactcgcatccagtggtctagagcatgtttgattaggcaacttttagcagtcgtcctcagctgtgcatattaaaatggctcctt

SEQ ID NO: 454 - DNA, 457 bp, Homo sapiens
  misc_feature (1)...(457): n = A,T,C or G
tctagtcattgcctcaacaccagtcattcctactcccacccagacaacatcatctccactcccaagcccgaaatgctccctgccatgccttcgaggctgaggtctgggaagaagactctaagaagagagaaaagggcaccagtatggagaccctagaatataaaaagcagacttagcctgtctaacctgttccttgacttggccatgatcccaggaatggaggaaggatcttccttttcttcctcctcctggagaggcatcagagcatgggccctggctctgttactccctggctggggaagttacttacctactccgtgtctcaagttttacttatctctaaaaggggtagagtaacagcactcactggagtggagtgngggtatgcctcccagcctctccttcagaactaggttacttattccctcactgcaaggagtggtagctgcggactgct

SEQ ID NO: 455 - DNA, 84 bp, Homo sapiens
cactttgggaggccaaagcaagaggattgcttgagcccaggagtttgagaccagactggacaacatagtaaacctcatccctac

SEQ ID NO: 456 - DNA, 462 bp, Homo sapiens
  misc_feature (1)...(462): n = A,T,C or G
ggaataagacatggacacctttgagaggccatttttctgctcaccacaaggccccaaggaaatggaagaggatgctaatggagggacccactggcacccactgagttggtatgaagagtattttaaactgaaacatttaagacacagcagatacagaaagaagcctttctggagcttcccttatttgactaaagccagagctttcagagagngaagctgccataaattccctcttggggagcttcactgccagtaaggagactttactgccaggaaggagaccacttgcacctgaatgacgaattgcataaccgaacataatcacaaattgtcgtaccatcatttgtttccctaaaagcccatttgtctttccacaaaaggatatttgcttccccatagaaccctttctctcctcctcccttttcccatattattggcatataaattcttcatccctaactg

SEQ ID NO: 457 - DNA, 439 bp, Homo sapiens
  misc_feature (1)...(439): n = A,T,C or G
aacagngattcttcagtggtggtctgaagaccacgggtgttccttgaggagccaatgagggaactgaaatctgtgagctttaaaccgcttgcttgaagacacggctgacatttgtggctgaatcctaatgtagttaattttcctttcaatgggtcaacttgcaactgttaggagtcttcgaaaccttttgtgtgaatccaggagggaaaattgtctggcaaagtctgataagcatcgtgtcaagagcacatttgtactctggatgggaggtgaagggaagagcagcatcatctgtgcagcctggtgaaacggtgtttacgacaggctacaccgggcactactggggtatgctgnctccttggattgngtcatatttttaacccagtgggaaattcataggatcctcttgactctgtaaaaactgtgggacaattcagtc

SEQ ID NO: 458 - DNA, 660 bp, Homo sapiens
  misc_feature (1)...(660): n = A,T,C or G
agacctgggcctgcaagaggaagagaatcgcctgaggacacaggagcggggacgggagccaggctttgagtcagtcctccctctcctgggcaagccatggatcatcctgcccagcacttctcgtccttgacggctgagttctgaagggaggaaggcaagacccaaagagacagatggacactcccgggatgacacagttcacagcaaggccaagatgcaaattaatctcctaactctcattacaacagcttctacttttgcctcttctgggttctttcattcactcaacagacatttgcagagttagctcatagtctctcttaagttttagatatttgaagataagcgttaaaagtccctatgattggggaacccacagcttatgggagaggcaagtattagaggtgatttactacaactcgagggatttactgcaactcgagggatttactacgcaaagtgctgggcattccaaggaggcatggaagctctctgaacaccanggcagtaactgctctgcccaagagaatggggtccactcttgcaccttgaaggaccagggatgaagaaagtggttcanatgaatttctgaattagtctgactangctcttgaacctggcgcacaataaatgnagtaaatattgatgccataaataaag

SEQ ID NO: 459 - DNA, 233 bp, Homo sapiens
  misc_feature (1)...(233): n = A,T,C or G
gtggaggactttctatcatctctaccaattgatcaattcagaccaagtaagcattgcttcaaaggagagttgggttgggggtgcatcactccttagctggagatacagagaaatctatacctacaagatcctcaaggtgtccttgttgaaaacttcatccaaggaactcaagtactgctggatttgngtgactcatnttacgaacnaatacaaaggcctattaactatttaaa

SEQ ID NO: 460 - DNA, 628 bp, Homo sapiens
  misc_feature (1)...(628): n = A,T,C or G
ggaaaccaggaggaattccagaatcaaagagaaccgcattcctctctaccacaaagtactcacacttggcaaatggcaaagatttgggtcatcattttttaaacgacagccaagcattaaagagcccaggcagagagcaagtaaaagagtctccgtggttcctcccagcgctagtctgtggcctcaacaacatagcacgttgcaggaaaaattccaaatttctgggtcccaaggggaggcattactcagcagtctcagcggtgacggcgtcagcaggacaagagccatttgctccgggaggactttgatgtttctttaaatggttnctgcatctagtccaatagaatggatacggaattatctttattacaaccacaaggatgtgcaaatttatttacagtataaatggttctttccacaagtcctagctgtcaacaactctttattttcctggagtgacttacaagccaagaatgntttgtttcttaagcttcctacctanagaggtaaaataacaatcttggtaatgagaagacaaagaagctaactgttctgctttgcaagcgttcctacagaccgnaccttttaattgcctagtgctggcaacttaacatactgtaatgagacc

SEQ ID NO: 461 - DNA, 317 bp, Homo sapiens
gactgaggctaaggaaggccttgtactggttttagagccctggacggagctccaggtgacatgggccttcctggttctaccaccgacctgctgggggtttcagcaagccttcaccttccacgttggcgttctcagctctaagaaaaggaagttgatttccatgagaggtgatcaaactgtgctgtagaagcctcagcgattccacagaacattagagtacctctgccaagcagaattctccacatggagaaacctcccctcttactgattttatatgccatgcatgtcaacgctctggggaagattttttgcttgag

SEQ ID NO: 462 - DNA, 308 bp, Homo sapiens
  misc_feature (1)...(308): n = A,T,C or G
aacatatacatttcggtttcaacatagcggcagccagagcggtcctcttaaagtggaagtgatattctgcttctctcctgcttaaaaccttcagatctccctatctccctaaaagcaacaaccaaagtccttccaggggctacatgaacacctgcatcgtctggagtctgctatgactcagccctcaatgcctacaatactcatgcattaagaacatattgagtgggtatggaaagtctctaaatcntctggtccacgctttagcaaacacgtctcaatatattctacttctacagatgagtaacttc

SEQ ID NO: 463 - DNA, 464 bp, Homo sapiens
  misc_feature (1)...(464): n = A,T,C or G
gtgagcaaacaggtttccaggcattcgcattccacgatttgccaaggccaacaatacactgttcaacccaacagttgttttccactgaaatatacaaacgattgaggacattgacaacatagtgcctttctagaaagatggccatgacatcgctgtgatcactgcttacattccacgctacctgatttgcatcatgtagatgtcgctgctgtgacattgatagcctgtgactccccagccttgtgaatcatgtcagcgcacataatgtgcatgaatgaaatggagtgtttttaggatgggatgccactaaaatcatcctgggttaatcctgtcatctggcggnttccagtgtctggacatntggatgaatgatctgcttgagagcccnccaaatantagtgggaggcaggggatcagctttttttcacaccctcttgagctgctgtaccgngcttattcttctc

SEQ ID NO: 464 - DNA, 213 bp, Homo sapiens
ctttgaaaatctaccattcggcccttttagtctttccggctgatctttcccatccacaaacagatgttgctcactggattcagcacttccatcaaaatccccaaaagcctttatgcttagaaatgaacagacatcaaaaaggcagcaactgtcctctttactgccatttcctcttctagggcctgtgacatgacaaggataatgcaggaggtt

SEQ ID NO: 465 - DNA, 389 bp, Homo sapiens
aagccagaggagagggaagaggttacctccacatctctcaagggctgggaaattccagaaaggtgtctcagggaatgggcagccacaggactcagaccccagaaagtgcctcgaacccccccagcaccaagagagtgtgtgaaccagtggccccgctctgtccacacttggaatgtctgcttaaggaaagatgtttctggcttccagtcttccacatcctgcaggtcaaaacagcttccatggggaagacatggcctgggacggtgccaatgggagatgtatttcttggacttgctgagaaaggctccatcccactgatggatgttggctgtgctggcagctccgcataatggaacacttcgcttgatttataaaggacccaacttgtc

SEQ ID NO: 466 - DNA, 582 bp, Homo sapiens
  misc_feature (1)...(582): n = A,T,C or G
taacctcataggtgctgggttgttctttatcaacttggtcaagctgaggattgtccccaaaatcccaacatttcgtggctctgaattagaaatggccaaagagacatctacctgtgtgtgacctggaaggtacaggtgaagcaggacaactgtttctgaagctctttacacagtggatcacagactaacaaggaggtgtcagatgggtgagcagttcaggatgagaccatttcttcttcttacctacttcatcattcacgctcatctcaatgttggctataaggtaaagggaagcacgcctcaagtgatcatgcaaacaactccagtgaagacactgcgcatgctctcttccaagtgcgggcaggcagctgtgcatgtgggcagcccaccccaaaggaagaagaatcaggaaaggaggggcgcaagacttcggacgtatgccaacgcataaaaccccaaagtcaaaagctcaaaccacacatctgtccttcaagatgcctactttggcccctttcaagaagtaatttactttcgttcattnctgctctaaagctttttaataaatggtcacttcttgctctt

SEQ ID NO: 467 - DNA, 342 bp, Homo sapiens
gtgcagccgagtctcctggcggagttttaagagcatggattctggcaccaggatacattggtcacatcttgactgctgcttacaagctgtgtgctgccggacaagttcctcgacctgtctgtgccttggtttcctcgctggtgaaacaggggatgggtatatcttctcacgggattgtcatgagaatcaacacattcccagggtggactgggaagagggtccgagactagtgggccctggagcaggtgtcacacgtgcgaggagctccagccctcaggaatagtttggagccacgtggtaggcaggaaatgattcgttgaataaatggattaaagggtgcac

SEQ ID NO: 468 - DNA, 206 bp, Homo sapiens
tcaacatgcccgagtgctgtgaacgttatgagagggccttgttgggaacacgtgctcctgggaatcagcccttccctctgtcctgttcccactcctccccgacgatgctcctgctcagaacccactcctcacctcagtgaagcaacgcagcgggcaccctgtggacaaagctggatattggctctgaataaaagcgaatcatgggg

SEQ ID NO: 469 - DNA, 926 bp, Homo sapiens
  misc_feature (1)...(926): n = A,T,C or G
tcaagaaactggagnncanngccgtcnnactanncnctngcanngnacnttgccntnnacaggaaacggaccnggattatattanaactattcaatagcaagacactgcacacccaatgcgagaatangncgctcaattgggagacgaaaaagagtgtgaaattangcaatcggcgaagagtctacatcantggacacngcttntgagagnnngggnanaaagggccttatttccgggcttattggacctngngagcaacaaaaacaaagaacaaaattccgggntngctcttggatgccccccntngtatcccgngcgttgtcatcgcaaagngggccgccccgggttcttttttgtcaaagaccngaaccttgtcccggtgcccttgaaatgaaactgcaagcggacgaagggccaagcgcnggcttatccgtggcttgggccaccgacgggggccgttccttggcgccaacttgtgctcagacgtttggtcacttgaanccgggggaaagggggacttgggcttgcttattggggccgaaagngccggggngccaaggaatctcctggtcattcttcaacctttgctccttgcccgaagaaaagtattnccatcattgggcttgatgccaaatgccgggcgggnttgcattaccgccttggatccccggcttaccttgcccatttcgaacccacccaagccgaaaacantcgtcatttgaagccgaagccacgtaacctttngattngnaaacccggttcnttgggccgaatcaanggaatgaatctttggacccaaaaaaagcattcaanggggctttgccgcccaaacccggnaaccttgttcncccaagggcttcnaaangggcgccncattgnccccaaacggggnaaaggaattntcccnccnnnggaccccattggg

SEQ ID NO: 470 - DNA, 348 bp, Homo sapiens
  misc_feature (1)...(348): n = A,T,C or G
agaactgagatcccatatgaagaagccaaaccatactgctagagacacacggctcagccaacaagtcatcagtcagtctcaaacangacttttgagtgaagctgtcttaaaatatcaatccccaggacactcacccaacaagatgcagaatggaagcaagcgaatgaacctagcccatattgctaacccagagaatcatgaagaagtaacatagttgttttaggtcactgattttcatagtagttggtattgcaacaatgcgtaactaatacagcatattattactaaatgtttaaattgtacttaaatataagccaaaataaatgggttaatccaaaaaaaaggcca

SEQ ID NO: 471 - DNA, 406 bp, Homo sapiens
caactcctccatctttcatgaaaacatcaagaggcacaggacgaagatcaatggagtcgtaagaagattttggatttgtgtgtgtggcctctgacaaaactgtttcctttgtttctgatactccttgaaacctcgcagttcaaaacctacttttttggtttaagatcaagaaacggaggcaaagagagattaaagagcttgcccaattttagaaagctagtgagtgggacagctaagaattcatctcacacccgaccctggaactgatgctcttatcacttcactcttctgccttcccatgatgaggcaggtacatccggggcagtattgctgtctaggctgttgttacattatggtgaaagactaattccaacatgaagaataaatcaaaaatttattaattatg

SEQ ID NO: 472 - DNA, 459 bp, Homo sapiens
  misc_feature (1)...(459): n = A,T,C or G
tcaccttgggttcagaagctatttctgtaagctgcatcagctggacttggaccatatggcggaggcagcatctacatttgatgattcaattgacccggcggatgactagatcgttttaaaagccctttgcgttctcgcaggtcgtttgtctatatcagatgcaaaaggaagcgctgtagccacctcaaatcgccctggaatgctctctcaaatgggctggactccgtgatttgtcaaggaaaattggacattacctggtaaagttcttcctaaaccatgggcccagatgtctgcttgacagatgtcccttatgcttgtttcaatttaaagagtgtggttaaaagactttggcatgatttattttttantttggcgtatttggtggaagtgggaagggaaggggccagaaaattatntnggcaatttaaaaaccgtaacagattttgcttggcctctggg

SEQ ID NO: 473 - DNA, 435 bp, Homo sapiens
  misc_feature (1)...(435): n = A,T,C or G
ccaggcactgagaagtgtacagaaagactccaactgcccgagattcccagagaagcagaacacacagagccacgacgagaactcaggatggaataaacttccaggtccatgtgagcttccaggacccagcccacatctgccaacccaccgtgtcctctgcttcatgtttaccctgcatccttttcactgatgccttcaaatatccgtgtgtgcacgggaacagtggttatgctgccaatttaaagaaccaaggcttcagaggaaaggaaactcatgcgtgcccccaccaccgactccccggttcctgctggttatttgtaaaagttattcacaggaggaagagaaagagccttcgtgngngattccctggttacattacggggggggtggaaccaaggttctctgggcagcttcctccaccatctgttcgcactg

SEQ ID NO: 474 - DNA, 238 bp, Homo sapiens
  misc_feature (1)...(238): n = A,T,C or G
tgccaggtgcaccttgaacaatgattatgactgtgactggagtacttcaacatccctatcactgacttcaagaagccctgcatcttcacaagatctacaatttcattttgcaaatgattcccatgtatttgtctgcactgcaggattttggacaatttaccttttttctctctgccctccatttctctcacctataaaactgtgacnataactgtattattaaaatgtttaaatcggc

SEQ ID NO: 475 - DNA, 447 bp, Homo sapiens
  misc_feature (1)...(447): n = A,T,C or G
tgttaagtgaccaacttgaatgccagcacttgatgagtggagggaaagtaaccgggagtgattccaacaagatggcacaccacccccttacaccacattggtgaagaaagctggatgaagatttccaaagaaagcggccctggtgggagtgggctttcaggctttggcaagaatctggaattcccttgatagcttcttctggagtgcacttaaaacacanatttattccgngaaaatcaancagcatcacanatgcncatgcagggactgacagaaatgctgcattcatgtaccacattcacggaaattttgcactatttattgctcatgagggccgacatcaatcatgtgatagcaagaaatcatttgntcatggtagaatcccctagttggcaaaagttgggggttatcttatcatttgacacagggaagccccatatattctga

SEQ ID NO: 476 - DNA, 452 bp, Homo sapiens
  misc_feature (1)...(452): n = A,T,C or G
gtgcctagagtcctagagagctagagatggagggaaattcagatcatctaaacccttcagcccttcactggacagaagaggaaactgaggctccatctgcatgacgttcccagagtcacggcacaaattcatggaagaagcagcaggaaactcagttctccagtctgggtccaatgtgtgttttagaaatatctccacagggttaatgactcaatttttcatgcatgattgctagtaatgacaatcatgttatgtttgtttctgtagctttggaaatcactccttccacttgagtttcaggtcccaactgtcacacctgcaggagtganggtttgcntgaaactggataaggcctccattttgngggagttgaattgtctcttgtagcctaaaatctanatttttttccctcctctgctctcagngaacggagaattccatctcggtacata

SEQ ID NO: 477 - DNA, 190 bp, Homo sapiens
agaattggcaccaagcaagagcaaggaaccagacatcagttacggaaaatgtatccccacatcacatcatgggagcctagctcacagacactgccaatggaaattgcagaaatagatcaactgcaaaaggttacataggggacccgcatgctacattaactctctgtgaataaattacatgtaaaatttg

SEQ ID NO: 478 - DNA, 54 bp, Homo sapiens
gttgccttcagaccctgaaagagattttcaggagaaatttcagtattctatacc

SEQ ID NO: 479 - DNA, 300 bp, Homo sapiens
atgttctgttgactcacacggaaatgtagtcactacactgccattggtcaacttttcatggggacatttgttaatccaatggtgcttctgctggagacatggagatgaacccactaggcactgagaagaatgcagtgtctcttccctgcacaggattttaacttaatatgtatgctgggactggcaagtgcccaagggacccatctctacccattggctgtcagccagagaacagcctggtcttgggagtgtagatgaatccattgggtttttagctcctaaataaaaagtttcattgtc

SEQ ID NO: 480 - DNA, 444 bp, Homo sapiens
  misc_feature (1)...(444): n = A,T,C or G
tccttcagaaaagcaatgcattctactgcttccacgatgtaagagaaaagcaaataaaaacattcccattggagagattagaaaaccaaggaaagaaacggaggctcttcatggtcgataagcaccccggggccagtctcctgacgtccaggccctgctgaaacgagtctgttctcacggctgctggtcagggctcaaacgacagcaccttggatccgttgtggagaacaaagagctaattgaaaacatctgggctgaggttttccaactggcttctcattttggcccggtttccaagcagtcaagctccactgaaacatacactccctaatcgattgctgtctcaacaacaaaccaatggttggcttggttaagttactancaccagggaanaccctccatgttctaagtggaatgttctgtcgcaaagctgccaaagtgaca

SEQ ID NO: 481 - DNA, 187 bp, Homo sapiens
cctcccaaagcaagtctcttccctctggcagcagagaagcggattttctgctcaacctgctttgatcaccaaatgagtcagggagaagaacatggatggaaatatcctcagtcaagaacttcacaagcaccagttgccttaaccaggggctctagaaattttctagaataaatgcttctcaatttgt

SEQ ID NO: 482 - DNA, 380 bp, Homo sapiens
actgatactgacagaaaaatcatcacatggaccctgctctcatgctgtctaccattcaacaggaaaataaaatatgctggactccacttggaagaaaatgtgtttatgcctttttaggaagtcgtgtggcagccccatagagagttggctgggtctcagcccagggccctgggccatttctgccacccagaactcagggagacagtctgccaccctcatgaggggacacccaactgacagggtacctgcagcttccctgagcttcccaggtgcctgcaagtattccccatcttcctagacctagcccctttcactgcagaagcctgcttacatttatctgaaaattttaaaagtttaatattaaatctatgatgtgtgtg

SEQ ID NO: 483 - DNA, 398 bp, Homo sapiens
acgtgagtcacaatgaaaagtcatagttggagattcctcatccggactgtagaaaaggtcatgtccctaactccagaatgccaatgataaaggcacacgtacaggcatgttagaaagatggagaagtcagaggaagatgtgcacaaagttaaatcgctctgccctttctactatcagatcatcaccaaacactcgtgggatcacactgagaaggatcatccaagtcaagagctgcagaagaaatggtgcacatattcaagagtctcacctttagcctttcctctacagcagaatcactatgctacattaatttccttctcatctgatgacttcttgagagctttttaatttctgcatctcctatttcttacccaaggcattaaaccagctggcagatt

SEQ ID NO: 484 - DNA, 425 bp, Homo sapiens
  misc_feature (1)...(425): n = A,T,C or G
atgatgggaggcaatgaggatcaggaagatgaagtgtaatgtccaatccccttgaacatggcaactctggactccctgtccagtgctctttccactctaccatgcactagttaactttttatgactgcagtgcaaattcttatcaggaatcctccaaaggtacaaattatgtccttcaatctgttctcctttgacatgcccttctcctagtctgtgaagtctgattggactgggacctatctccccactggaggaacctgtggggccatgagaaagttattttttctgaaaactcagttcntnntntgnaaaananaaaataangttaactttaccaagttgttgggagtaccagncctcaacctttttggccccagggaccagttttgtaaaaaaaaatttttccacggacccagggtggggga

SEQ ID NO: 485 - DNA, 326 bp, Homo sapiens
tgtttcctgaatggaggatgattcccacttacggaattgataattacagattgaggagagatgggatatggctaacacatgcacaggctgctgtgactctatgtggtccctgtggtccctctgttggctgtccaagactggagcatcttaggaaatggctcacctggagtaactgattgaggtccagtcaggcatgtgaggacacagtgtttgccccactggaggacgaaggaacaaggcaccatcttggaattggagaccagagccctcacaagacactgagcctgatgttacctttatcttggacttcacagcctctaaaattg

SEQ ID NO: 486 - DNA, 226 bp, Homo sapiens
gtgaatttggaaccatcttcagaatcaggctgccgtgctgtctgtcaatgtattgtaattgagacctgcaagggctcttctcacacctgggaacatcatggtgacattgcatctgccaccagctccagcctcaggaaggtagcatgtgaggacaggtgtggctagttatcatcccgacgcctggttaaggcataataaaaatcagatgctgttggcctcccatcgg

SEQ ID NO: 487 - DNA, 199 bp, Homo sapiens
gtcctggcctggcatggagatggtgagtgtgccactgttttatcgcagctgagctggaaaaaaaaatgctgtgtatccagcttccatcaccttgaataggatatccgtgataagcaaatgaaacagaataaacttgaatacataaagccatgtagcattttctgatctccctcaaaggagtctactgaaatactgaagc

SEQ ID NO: 488 - DNA, 467 bp, Homo sapiens
gtggaccacatttcccagcctccttgtgttttggtgcacccatgtgactgtcttctaaccaattttattcgagtggaaaagatgtggccactgcctcatctggcccacaaaagccttccacgtggcccctcctccttccctctgcagccacgcacacaggatccaacgcagaactgggtggcctgaggaaaggatggagcctaagatggaaagagtctgggtcctgaatccccttgtagaagaccgcctgcttaaacaggcactgaaatgccccaggagcaagaactgaaacacctactgtgttcagctgctgagattctggagttgcctgaagtagcagtcaacttgctttgcctattgcacatatacatgctcatatttaactccaattacttgatttaacaacactctacaaaagatgtttttgacatgctaagaaaaaaagcaatgaccaaacaagtacccca

SEQ ID NO: 489 - DNA, 401 bp, Homo sapiens
gttcaaggaacacattgttccctcaaaaaacagaccggcagctgagagaggatggcaatcctgatggatgagaaaaagaacagagctgtggacacctgagagaagactataggacttcaaacatcaacccatttcagttctgatgtcagcaaggagagaactggcaaactgggccaaccgtttgattgacacatagaaggccaactgggtaaaatcattactcaaagactgtatttccagtgcactctccagttgtatctggtcagggcatcatccaatgctgtggatgaagcttgctgtcatttagcaaaatgtcatagtgatcactgattgtttgcctgtaatagttaatagcaacctttctgtcaatgctataattaaaaaaattggtttttggggtt

SEQ ID NO: 490 - DNA, 469 bp, Homo sapiens
  misc_feature (1)...(469): n = A,T,C or G
atgatgtcagaagtgggatccaaagtagaggttctaacgacccccaagaacactgagtgaccaaacaaggtacctgctggactcacttgtgtctgctgatctttcagggcagctggggattgtgggcagttgcacaacctggaggctggcatcatggggtcatttaggattgaatctgaaggagccgctgtggtggaaatgaaatccctgcacaaaagaagctggggctgaactatcatattctcctggaagtagtgaaccagcagctgagccacacaaaggacatgtttgacagataaagaacactgatgccaaggtctgaaataaattttttagcattaacatctgtgtctgtgcaaagctcttggctgctttcttcatttgatgctttggatgggtctggtagaatctgttgacttcactgnttaccatgctaatatctggtttaagcangctctgggtgacctgg

SEQ ID NO: 491 - DNA, 304 bp, Homo sapiens
gagctaaggactggctcaattgactataaagaatcgagaatgtcagctgaccaggcaaccaggagacgctttcctgacttccactatgcacgtgggctgcataattgtgtctgtgaagtaatgaagaacgtgcttgctctgtaacatccaaacgcgtggccaccattcacagatagtgtcctttgggaaaggtgtgggtatagatggggaatggtcagtcctatgaatatggggctataagacagcaaggctagaaagtatctgtgctttcattttttaattttatctattttttttttttttt

SEQ ID NO: 492 - DNA, 181 bp, Homo sapiens
tcttaaaattatgggaggataaagcatcaggttaaaagctacaactggatttgcgtgcctgagcagaaagacagaagaggcctgggacccaactagcatcatactactgcttcatcagccctagatgactgcctacctccctatacttccttacaagacaaaataaactccgtatttgttt

SEQ ID NO: 493 - DNA, 158 bp, Homo sapiens
tttacattcaggttggtggagaggaaagaagattgaagagttatcctccagcaattattagccatgataaggccatatcttgcaggaagacaatgaagaccagaaagtgagatcctaagctgatgattccatgtagtaatgagtcaaattaaatgatg

SEQ ID NO: 494 - DNA, 53 bp, Homo sapiens
tcccctaccagcccctcacccaacccctcccttttccccttttgcaggagaca

SEQ ID NO: 495 - DNA, 493 bp, Homo sapiens
  misc_feature (1)...(493): n = A,T,C or G
ctccggcagtaaactgtacctcaaaactagaagaaaggaagatttaacatgcaaccttcgcttcaccatctctcttccttcccatgttccagaagattctgcataatgaaaacactgtaatctctcaagaaatatctcataaagagtgcatgagaaaatcccttctccccagagcttatttctctcgcattttaattctgaatgaagggatcataaaagcatatcaagatccatgttgccccacaaaggacattctgaggcaacctgaatgcccccccacccacgtgagatagcaagtgatttttaagggatggagtaggctataaaagggagtcactgggagacaaaaggagtaaatggaagaagggaaaggaagggagaagaaaaaggcactgaggctggcgtcacagtcttgtatggaggcagagtgaatggtgcaatgaaaagttccagaagggtaaatcagangacccatatttaaatcttgaattcc

SEQ ID NO: 496 - DNA, 442 bp, Homo sapiens
  misc_feature (1)...(442): n = A,T,C or G
cttttggagcagctatggctacttagttcaaaatggaagaaaagctggattgctgctattacaatccctctatcctgtgcgaagaaagagccttggaacttggaaaagaaatttaaagcaaccacaagctacacaaccatcactatgaaataaaccctttttgtgtggcatgaaatcgctcacagaaaggcttgctcttgttctcttgatttccaaatgcataaagtaaaagtcaccccactgctaatgctaggtggttaggcagctgttcatcanaggtagtcgcaaagcaaagttttaatgtgaactctgataagctggactaatgttttttgggggaangggtntgttttgaaccacctggttntaaaacagcttgttgaaaanccctggggtaaacatattgaaatggctggggggaaagaaaaatgaagcaaagcaa

SEQ ID NO: 497 - DNA, 546 bp, Homo sapiens
  misc_feature (1)...(546): n = A,T,C or G
gactctggggagctnctgcattaantctacctntgnncacccatgtggaatacctgtgcatcagaatggaacagccagatctgcacaaacaaccaaggacttctcaggggcctctgctgtaggagtctccaagaaagaacaagctgaatactcaactcagaatcagctgaagacttgcacaaagaaacaagcttttgcatactcctgacatccttctccttctgaaaccagccagatgagagcaacagcttttttagcttagttgcccaggaggcagtttctccagtgcagggtagagagggcagccaagtgaaagagttatcgaccatgtgtgtgctgagttcagtgcagcaaaccaagctgaactgagacttgagacctcagcatccacccagagtctcaatctagcaatctgctaagggagggttgaatcctgtactcacangcccaaacaatctggcaggcacantctattttccacttctacggaacatgtgggagttgngttattaagcacggngacagttcacacagaccggaaaggtt

SEQ ID NO: 498 - DNA, 571 bp, Homo sapiens
  misc_feature (1)...(571): n = A,T,C or G
ggttgggcttccttnnttttaaaangcaagtanccnccctttnggttgtnntngccnaagganggggaaccagaagccganatgggtcactttangccagaanccccgggaaaactccgggggaatcttccagctggctttcctttgcaaggggaatcttggaaccccccatttggctgccacattggaggataataaaagcttccacaactttcatttcaaggatgacnatgaaagcagggggcccaattgtgaagtactttttctgaagtcccaagaagtggacaacttgcacaagtggaaaggnngaaacttcgtncggaaatcccccttattgaaattttaaaagaaccggngaccgtggaaaagccaacanggtcaaggggagactggcanttcttcctcgatgnccnatggggggttaatcntttganggttcttgacancctatttcagnaaaaaaaaaaatgggaatcttttgcnttcacaatggtttttccttnttacacccttaaatccttccncctttangttcaaaaaanttcacnttttttanaataaaaaacttcct

SEQ ID NO: 499 - DNA, 509 bp, Homo sapiens
  misc_feature (1)...(509): n = A,T,C or G
ggggaacccttgcagctgttccacctgaatagtggagagaggtgtgtggccacgctgaaacctgaaaccataacgtaagagcccaagggagactggaaactctacagccatgaactaaaagcagcgtgtgtcagccgcagaatcggataacacaaccaaaccacaaatgtgcctgccgctcaggctttaaagttctacagtagagcaggacccactgtgacttactttgtgtgatggagtcaaaccacattttttttcttctttttctcatcagacttcacaggaaatataccgtctttgntcagatttgagataagggaccccttcaccttgactcttctttgcggcatgaactcacccattaaggtgctcactttctatnctaagnccatatcatcagccncttatatttaatangcatggggggttggaatggtcttaatgtaaangggggaatcaaagctttatctattaaaaacatgggttgnaagncagactgggaagacaat

SEQ ID NO: 500 - DNA, 475 bp, Homo sapiens
  misc_feature (1)...(475): n = A,T,C or G
cagaaactgagaatgagccaagtcagaagcccaaagaacgcccaagccntttnacangaaagacacagaggggtgacttcaaatgatcagtccaagagttttgcttgtgagaaggaacataggaaggtagccaagtatgacatggcttcccatagcccggctttagacaccccaacacccctacacccacatctccacgaacccacacacatcagaagagtatgcagcttcgcctgggctccacccttgacagctgcctttgtcctgggctctggggacctgccctcaagcctctaacacagacctcanggccaggaggccccaaaaagctgatgcctttgggctactggctggtgncctaaagggcatcacacacangggtcaagtgactttgtgttnaaggcccttntggagtaaaagccatcatcttttntgccccctncagtaatttactaacagagatggaggggaccca

SEQ ID NO: 501 - DNA, 511 bp, Homo sapiens
  misc_feature (1)...(511): n = A,T,C or G
gcccctttccaatactacaggagacttaggttctaatagaacaaatgatgtataagaagcagcttgaaacctcagaatgtaaccacaaaaccacaacagctagaagataatggactctgttgaaacagcagagttccctgatccacctcacctgacgtgcgacaggggtgtggcttgtctcttcggtcactgccactgctcaaacccctgagggaagggggcgcacacagatggatgaatgcaggagcccaagtggaaagtgttctccgggtcccgaggagacattccgtgctcataaaaacaggaccaaaaacagatgaaattacttcgaaacaatccttgaatgatttagtgtgtttcttgacaaagggaaagaaaaaagtcatttgttttccctgtcatgagcgccagaaaggattaacgtcatttttgggcaatgggagaaaaaaatgccaaccatttgnttacagtcatcgtcaaaacccttgtttgccaanttcattttctaaaa

SEQ ID NO: 502 - DNA, 506 bp, Homo sapiens
  misc_feature (1)...(506): n = A,T,C or G
gagaagacacaagaatttggagacagcagaggatacagagagtcagccaaataaactggttggatcacctgttccagtgcttcccaccaccatacagaaccttcataaataccactcaaagaaggctcactatcaatactgttggtccgttttctctggaggagaatgtgtctctgctggctaaggctttctttatctcgtcccactctactacagcctgcagacccacccaagactgagggtgctcaaagctcagaaggcaaaggactccttgccactcaacagtatcaagctcaacacctcagccaagaagaatcagggagcacaggcacacactcaccatgctgaacagacagcgaggaccacatttttattatctgattcctatttgaccatctgatgtgcaaattttacctatcatggtgcctttgctccagatctaagtgagatcagatggaatggaggcttcatctggtcnttaaggaatctcaagttttactgatcta

SEQ ID NO: 503 - DNA, 499 bp, Homo sapiens
  misc_feature (1)...(499): n = A,T,C or G
ataagaaaatggaggtcacaagctggagaactccttgctcaagttgcatagctaataagggacttagctgggattcctggccagcagtgtggctccaggcctggtttctaacttccccttcttggcaaccaccttcacagaggaatgcaagagaagccccccaacctgccccatctccagctatgcacacagcctgcatcccggatcactgccccatgctgacagaagcctgtacccaaacactcttcactgggtcctgagtctcttgttctggaaggaacaacctagaaacctcgacgtcactgttcaccaacaaaaagtgaatctattacaacgcacatccctgctttgctgtttttatggcttgcctgtggaaagcagggtctgtagaagcgcactaagaaaaagcctgacagagatcccagcgacgnttcanatcagaggagaaaaatctgtcccaaccttatccgtttggangcaggggggaaggggtcttttg

SEQ ID NO: 504 - DNA, 471 bp, Homo sapiens
tagcatgacacaattccttcaagacttcccagcctgcaggagggagtcgctggctaaacctggatacaggccgggatgctacaacttgctggttgctcaactctagatggtcaactgtccgttcccagagctttggtttcctcatgctggcagatcatcactgatgtccattccttccaggtgtttagttcgtaggccagtcctgagttgttgagtgagaaagtaggaagagtacgcagtgataacatgaggagcagaacagaagactcttttgtgtgacctggaaccaaaggtcatcatgctggggcagagtgtggataggaggcagaagggactacatttcatgagcacttattatatataagaaagtgttattggctgggcaccgtggctcacgcctataatcccacacttttggaaggccgaaggcatgaaggatcacctgaggtcgagagttcgagacctcgaaaa

SEQ ID NO: 505 - DNA, 499 bp, Homo sapiens
  misc_feature (1)...(499): n = A,T,C or G
atgagaaaacaagttaaagcctagagagttcaagtcatcattaagtggaattccctctgagtgcacagttttcaacagactgctgaatgagaggataaaggcattaaggaggaacagccgagcttttattgagcaggactgaaagggtgaattggagagaggtgaagctcaagagcaggaggtggaatgaagttacagacactgagaagaaacctgtgaactcctagtgtgaaagaccaaaaggaaactcttgataatggaagacaagatgcagcctgtgtgtaaggggaaggccagtaggaagcagggagaatgtaattgttgggaaatcagtggagatataccatagcattctctctccccacggcctgcccagtgcaccaggcacactaatcagcaatgttctcattctcggaggcaggacctgctgctgtgacaattgaggctgggggtganggcatgctgatgaaactgctgccatccccaaagcctcgcttgt

SEQ ID NO: 506 - DNA, 335 bp, Homo sapiens
gattcttctcacaactaatattgatcttccgaaggacaaatgaatgagaagcctcaatgacagcaagagaaatacacaaatgtctgcgacacaaaaacacagcaggcaatgcgtgcctcttccagacatctctaaaagttccccaagtttaaactgaagaagggctgctagaaccaacgctcttcaccaatctatttctagttcactggctaaaaagtggctggagatacagtgaaggattttgacttaacaaaaatttgactcaggaaaggaaatgtctttttggtgtaaacaggtagactacaaaaggtattaaaaacactgttgctacacag

SEQ ID NO: 507 - DNA, 375 bp, Homo sapiens
  misc_feature (1)...(375): n = A,T,C or G
catttgtccctgactcccacctagtggcttcttccagcactgcacagggacaaagaaccaccactgatgccacctgagcccggcccaggagccccttgggagctgagcgcagaaagaaagcacggacacacctactcctttctcatctctcactcaagttcacacctgtcacaggggagcagcccattcttctgatggaccacagatgctccagtgccagaagatctgcagtcccagatgagcagcagcagtacaagatacatttcccactatgtaatccctcccctctgctaacagttgattcactctggggtagacactggacctaaggtgtgcatccatagcttgngaataaattaaaaagctttaatgtct

SEQ ID NO: 508 - DNA, 508 bp, Homo sapiens
  misc_feature (1)...(508): n = A,T,C or G
gacttgaacgaatttggaactgttccagagctcattgttctcaccttgtggcataacttaggtagtagggcaactcccttacccttgcctggactcttactatcaaagccctccattgataaggtctaggccgaccacaccctaaagcatttcttgtatgtatggatttgtttcttacctatacctgaagaatggcgctggtgaggtaccacctttgggagaattgagaacatcatcccttaggtgtgtgaagtgacacagtaggaagacgggcagagaaagagcccctgttccaagctggccgtcattcagctgagaagacggctttcctggaggctccacgcacaccatgccgncgcaccctcttcagctgatctgtggcccagctgcctcacggcaatacccgagcatgttttatataangctttcaaagctgctgctgctgctgctgccacttctgcagtggctatacctggnctttaatgnctctgctanacagaagcatcat

SEQ ID NO: 509 - DNA, 491 bp, Homo sapiens
  misc_feature (1)...(491): n = A,T,C or G
aagccattcaacagtggcccgttcccaaaacagtgaggtctgtccgcataatacatgtggtggctcctgatcaggctgaaggtgaacatcaacaacagcagagacaatctagaaaaactgccaggatgatcagaaggagaggtggcagggcttctcaggagttaagcttgggaacactgactgcaagcttttgagggaaagcctggcagtacagaaaggaggatgaaaaatagaaaaaatggatttgagatgtagctctacctctggggacagatcccacaactcctcacataaaagagatgccagaaggagagatcaaggttaagggtatatcacgagagactcaagacagtcaattttgatacctctaaaaaatctgtttaagtcacacagttaatggcttaaaaaatgatggcccctccccccactctagatttagatgaaattgnggtgaaatcctgagctatcttcaatgaaacatgtcttcaaaa

SEQ ID NO: 510 - DNA, 507 bp, Homo sapiens
  misc_feature (1)...(507): n = A,T,C or G
tttattatctctggctctctctctgtgtcagcatccaaggagctttcccgttgtctggtgaaaggcagcctgggaatgaacattgttagttctatcttggccttcattggagtgattctgctgctggtggatatgtgcatcaatggggtagctggccaagactactgggccgtgctttctggaaaaggcatttcagccacgctgatgatcttctccctcttggagttcttcgtagcttgtgccacagcccattttgccaaccaagcaaacaccacaaccaatatgtctgtcctggttattccaaatatgtatgaaagcaaccctgtgacaccagcgtcttcttcagctcctcccagatgcaacaactactcagctaatgcccctaaatagtaaaagaaaaangggnatcaagtctaatctcatggagaaaaaccacttgcaaaaacttcttaagaaaanggcttttattgctacaatgatttctaagctttaaaactggggttgagt

SEQ ID NO: 511 - DNA, 449 bp, Homo sapiens
  misc_feature (1)...(449): n = A,T,C or G
gaaacaaactgagaaaacaccagacgtggcgacatctataactttctacttatatgctcatcattatgttagtgtcatggaccttaacagttctgtctgcccagaccactctccttcctctgaaaacggaactcctagttttcctgttaataccccgcccctctggaccctgtggttcctatggcagcccggtttccagatgaaccaatcccgtagtccaggagcagtcacctgacccaagctgagccaatgagaggtctaccttgtgcaagttgatgcccgccttttctgccagaagaatatcaccgacccatcccttggttccagaccattcctgaaggccccagcagcaagngtcatgcctctcgtggcttggttaagttggcccctccttgatttgggggaagccaatggatcatcatcttggatttcagtcacttgccatcact

SEQ ID NO: 512 - DNA, 451 bp, Homo sapiens
  misc_feature (1)...(451): n = A,T,C or G
tgtgaattcttccctggagtgaacctcttggatgtggaacacgacagaaccaatactggtgaacaacagtcctccaagcaaatgatagtgctacatacaaaggaagttggaatggatattggttaagcaaaagcaatgtttgttgagcaaactcagcctcctcatctgtctatgggtctaagtcatcatttctttttctggactacactattctgactccttcaaaaagacctttggtcactttgatggttaagctgtttgaatgctgcagaaccttgactcaccacgtttactggaggagccacaaatccatgatgaggaaggcaagnttgcctttacttttcacagncanactccctggaaagcggttctgagacagagattggcattcaaggagtgaatgggggagtggcagagggctccttgtgtcaaccactgaagggaaaaactg

SEQ ID NO: 513 - DNA, 198 bp, Homo sapiens
gttgaaattaaggagcccagcaaacaaggacgttgcaatggcagttagaaacaacagttttgaaagggcagatgaaacagactcgctacaagacaaggggattgttgaaaagccctccacaacaaaggaaatgaactcaaatccctaacctgcggggcgttccagcaaccctgaggccaaaaataaagctctctgatg

SEQ ID NO: 514 - DNA, 461 bp, Homo sapiens
  misc_feature (1)...(461): n = A,T,C or G
gaccactagctctgggggaagccagctgctatgctgcaaacagtcctaggggagaggacaatgtgggcaggaaataggccacctgccaacagccacctgaatgagctcagaagcagatcttctggcctgctcagcttcagatgaatgcagcctcatgaaagaccctgagacaaaaccacccagtaaggtggccagaaggatcacctctccttatttatgtatatggagacccatgagaaaaatagggaaagagcaattacaatggcaacagccaactgaatccttccacccactggattctttgatgaactgctgcagaagctcattcatgccttgngataatcnccanacaaganatccctgccttcttccttacgtaagatgttctgttgggtatgaagcaagaggtcatactcgcaattgacaagcccatgccataccaaagagtatgtgtactgcaa

SEQ ID NO: 515 - DNA, 658 bp, Homo sapiens
  misc_feature (1)...(658): n = A,T,C or G
gncngaaactggancntttttccgaggggcctttttngangtgncntgganttccttggtcttttngaancaaaancaaangtccgccaacttacaggntccttcttcttcaaangaagccaaaaaacctggaaaaattttggtcaaaggaaaaatacttctttcaaaggaaaccgccaagccggatttcttggaaatggcttggatttattattcaagccggatttcttgaatggcccggattattattcaagccgattcttgaaatggcttggatttggtggtcaagccggatccttgaagatcaagaaagggccaggtactcttgggcttacaagcttgcctcccttacaaacccttgcaaacctttattttgcccaaaggtaaaaaaacaagccggggggaggaaaaagaaaagcccccaaatcttaagccccggtcccaaaatcaccaccaccnaaaggggcattttttaaatttcancaaagaagnccttaaatttccacccttggtangggaaccacttagcctggtaggtcccaanaaaaccgtaccggttaagaaaagaaaatatttggggaaaaatantantgcttgaggtggaacttggtggtttaaagccaccaagaacttggatncccantcacaccttggtttc

SEQ ID NO: 516 - DNA, 260 bp, Homo sapiens
attttctggcaactggctgatcctgccccaaccagtgactcatgcctcaaccagtcctgtggccccatctggaggccgactctgtgcaggaggaccattttccacacctctatgataccatctccaacccattccctgccccctgcccaccaacttgttcataaaaagcctagcctcggacttctcagagacactgatttgagtaataactccaactactgcatggccagccttgagttaataaaactctctcctgcaat

SEQ ID NO: 517 - DNA, 436 bp, Homo sapiens
  misc_feature (1)...(436): n = A,T,C or G
gtttgtgaacatccacgtgcagagattggatctgtggaaacggcactgctccagagactgcgctgaaccagcaaagaatgaactgtgataacaagcagggagctctgtccctgagaacgcctcacagaaagactgaaaccacagttgctgacctgagaggggagcaggaggtggaaactggaaggcagtagtctaacatgagagctgaagaggctacacagagatgggaagatctcctaatgcactgatcatttgttgtctcacatggttaggtagattatcataccacctgcaaataattacagntttgtctttttcttcccatacttattncctctcanttttaaaaatttattttgnatcattttggctaagggacctcagtacaattntaaataatcatggttacaataaccaaatgtatccagcttagatg

SEQ ID NO: 518 - DNA, 452 bp, Homo sapiens
  misc_feature (1)...(452): n = A,T,C or G
gaaagtaaatataatcttatagattgatcagaaagtggaaaaagattgattcaccattttgaagaacagaagagtctaacatttgaagggaatgagaatgaagatacccacgcaaacccttccaaagctttcatgtgtttcaagttaaaaaacaggattttgtgtgtgcaaaggtgctgcaagcggaggctgctaatggctcataactgcccccttctccagagatttcctcttggacatttgcctgggaggttacctcgccacccccagcccaggggcagcccacctgcaagggctaatggacatgaagaatacaaaagaccngcccacccccntcaaggnggaaaaaaggatgcaatttcctgatgggcaaaggcaggcaaatgggtcttacttccacattgtctcaggaaacacaataatagtcacttggctctcaccatatcccctta

SEQ ID NO: 519 - DNA, 290 bp, Homo sapiens
  misc_feature (1)...(290): n = A,T,C or G
aaattgactgccacaacaaaacttggctcccgtataaggaaaaaggaaaaactgcatacacatttaagccgaaaactcattacagaagaaaattagaagcgatgagaactgcaaatccttctttattgcttctctaattttttcaaaacaaaacttaactactgtaacgaaactattcagggaatagttttatgattaaagaaaaaaaagtgttgcgcaaaaaaaaaaaggnngncggggncnnttnanctnggncttancnaggnngaacttgttcaaaaggggggggg

SEQ ID NO: 520 - DNA, 577 bp, Homo sapiens
  misc_feature (1)...(577): n = A,T,C or G
aacttgagttttggtgaaaaaaccaatgggtggctgggtnggtggcctggaccgttttggccaatcttggcttgggctggccttaaccaaccctntactttnaatcctggggcaagcttncaanggaanggaacattcttactggccaccaaagtttnaatccaagcaaaggtctaaccttgggccaccttcnttcttgggtntgggcccattggangcttctaaccaatggtacaaatcccaatcaatctaactggggtgggcttcaaccaccaagggttttcgcttctgggaatttccgggctttggcccttttccgcttggctgggcccattgggggtcacaaccccacccaanggaaagaataaaagcttcngaagccttgacttcccaacnaaacttcccttttttcacggaagaagtcnaaacaagcaagncttggaangggccctttttaaccaaaaaanggcaanggttgggccccaanttttttggggaatanttttccaagcccnccccagaaaaatcanttgangccccaaaatnaaaaccctctttttttntttttattaaaatt

SEQ ID NO: 521 - DNA, 664 bp, Homo sapiens
  misc_feature (1)...(664): n = A,T,C or G
cagaaactggagggtattacacaatgggccctcggtttattgggagaatgggagccattcccaactggtgggggggaaagaattttccggtccccaggccccagcttgtggaagaataccaagtaaaggtttcaaagaatggtcaaggaagggccaagggcccggccccccccttggcttcggggccaagcaacaacaaacgccacaatcccttggaaagggaagggtcccttggaagaataccgaatggaacaaggggcccattcggggggggaaagcttgcttcaagccgcttgggaagtgggtgggacccaaacaattgaaaacttcacttgacaaaaggggaaaaaggggctctttcctcaataaacccttccgatcccgaaataccacttgggcaaaaaggggcaaacaactttttggctttgggacccttcttccccaagnttcttgaataccccctttaagaaaagaaagaanttttaggaggtaaccttnccaagaaattttcntttaccaattgggcaatcttnccaagaaaatggggcntcttngggtaatttaaatgggaaatcctaaaggnggccctttttttaaaatggtattccccaccgtttttggttnccccttaanccattcttttttttttttcaagaatgaatgg

SEQ ID NO: 522 - DNA, 451 bp, Homo sapiens
  misc_feature (1)...(451): n = A,T,C or G
gtctcatcctatgagcttgtgctgatttgctgatttacatatctccactggcgaaaatcatatctgttccttaggtccaattttcaagttccaagcattggcagtgtgaccacaaatatctatgatctgatgctttatttgatttttgtgtgtttgttttaatggaagtgtagaaagggagggaagaagggaggggaatatttgatttgctgtctagccaacacaattctaaaaagcattaagtggaaactgctacaagtgtttattttctaactctttctggtataatgggaacagtcaagatctgaacaagaagtcgatataanggtttgcgggttatgataagcatatcagccagnggatagactaaaccccagtgacagctgggatggttcttggaatcagacatncttcaataacatgtttccccaaagcttataaacattggtgg

SEQ ID NO: 523 - DNA, 666 bp, Homo sapiens
  misc_feature (1)...(666): n = A,T,C or G
cagaactggagggtcttcctattccctggagaacacaacaattattggaaataaggggcccaattaaataaacccctacaaatgggtctggtaaattggtgccaaggtgggaaagaaaaggaaatccggtggtggccttcttccgcttttaaaaatcaaaaaggcttaggaaaaatggaattaaagccttggacttggaggggaaaggggcattggttttgaaagcttgaaaacaggacttggaaaggccaaggttccttctttgcaccaaaaagggcccaaagtttgtttaaaagcaaaaggggaaaaaattattttggaaagtaaaattaaaggtgctacttcttaagtaaaccacaattttggataaagaaaaaggccaaaaacaagcctttatttgcttgggtaccaagaagaaaagttttggaggtccggtttgggggtaggaaaanaatcnaaaancccaggccccccaaaccantttcccnttttaaagccaaaaaagccccttaatttcccagggaanggggcccccttaaacctcttnttttcaaattctttnttggaaaagaaccttaaagaaagaagccttggactttaagaaacccccaagacanggggacntcttgacttcaagccttnccacgccaggaacaaccaagccaa

SEQ ID NO: 524 - DNA, 580 bp, Homo sapiens
  misc_feature (1)...(580): n = A,T,C or G
cataacttganagtcanagctctttgctgtgtcaccccaggcttggagtggtagtgggcantggatcattaagcttttttcaaangctttctttccaacttctggggcttcaaagccaatccttccccattcttcaagccctccccaaaggtagcccagggactaccagggtggaaacaaggaaaaggaaagtggctggtggtaccacttttccaaagaatcaacccttcaanggtancaggctggtcttttttggcttccttcctttgggtcttttttccctttcccacttcgctgggatgaaagaaaaaatggacaaaagcaaaagccacacatgggaaagaaagtcttgggacccttggctgactaccgaaagagggacaaacaacggnttcaacttgggacactgaancctggactgnttagatgatcagacttaggacncanggaagatttaaaccnctgggatatgaattcaagggcattatgctttttatacctacaaggtgaagccaggtcgagactcaanagaaggttaaataaactttnttccaaggacnaactgnttagaaactggaaa

SEQ ID NO: 525 - DNA, 519 bp, Homo sapiens
  misc_feature (1)...(519): n = A,T,C or G
gagctggagcgacaacaacgacgncgtttccgtttcaaccaccttttcttgttcccgtccttgaggacgccgggccgggtcaagtggttaagccttccanccttggttgtgggaaaggcgaacagaaagtcattgggcggatggtttggagcaagaatnaagaagcccaacgtggggcaaagtttgcttcaaggggtacccgacagggtaccaatcccttgagaaaccttgggcccacccttggaagccgctatgtagaagacgcangcccaagggaaaatgcctatgatctgggaaagccaacctggctgtcctgaagcttgtaccaagttcgacccaaccttcttttcagaccacggncacccggccaaaatncttgctgaaaggcccttaaccaacttggncggacacaaaactttacccttgtgcaagtgcattgatcgacccaggcacattcaaagaaagaacggncaattccgacagaatttttgtaccttgggggacctggttgggaaacgt

SEQ ID NO: 526 - DNA, 364 bp, Homo sapiens
  misc_feature (1)...(364): n = A,T,C or G
gaaaccttttcctcggagacgatttagaagatagaaggtaatgatggccaatatcagaaatgcatctttaatntcaaagatgaaaacaaccaaatggaagaggatgagagaggggcaggggcgccaagtcaccaggcaaggtttctaagtgtaaaataggaagcacacagaccttgataagtanttgatccaaagttgaacatcaacgtaaacagctgactgaatttgaagccagacttgtctgatactactgttcatgctttgaaactgcatcattccagctgatatcattaatatagcaatctgtataaaaagttcttaactgtgagacagaatccaggaatcactaacattctttaaagac

SEQ ID NO: 527 - DNA, 304 bp, Homo sapiens
tacctttggcccacagtgttcttatcttatagaacacacaattagccagtgaaaaactcataactagtctatctagtggagaaaaattcttgtgggcagtttgaaagcctctaagagaagattatgaagtttggaaccagatgccaggagacacgaggaaggctgtagatgctttgaacttgtctactggaggaatatgctatgttgtgtacttcatctctatgaatatttagcaaggatttctactgaacgtttgcagtaataaaaagtatgccatcagttttaataaagagacacccactcc

SEQ ID NO: 528 - DNA, 447 bp, Homo sapiens
  misc_feature (1)...(447): n = A,T,C or G
gtccccaggcactggananaancagagctaaggaggggaagtgtctgtctgtcttgctgaaagcagctgggagtgggaaaaaatagtcttgtccacttttggctatctcaagatgaacatggagctctccagcagaggaaatgtctaggaggataaggtgacatctatcaagtgaacctactatgcgaacacatctgctgataggcctgacccatttctatcatctgagaatctcaagtagcttgtccaccagccacagagagatgaggaaactctggaaaaagcagcttgcccctagtatgtcaggtctacaagaaaagggagacanttggtngggtngttttttggggcagggaaacctncctcacaggacacgacctgggaagatcanaaaacccattggnttaagctncaaatagagaagatgtttgaaacacagagaaggcg

SEQ ID NO: 529 - DNA, 450 bp, Homo sapiens
  misc_feature (1)...(450): n = A,T,C or G
gcatctcactacaacgaccttagaggtggcataaactgaaatataaaagctgggtctatcaagcaactaaaatctgatttgatggttaaaagctggaaaaatccaagaatgaatgaaagagcttgtggataggcccagacagtgggcagcatggctcttctccagcctgggacacagctcatcactcagggtggatcctggagagaagctgcctgagttcagcctttgcctatcccagtactcactgtgtgcacccagaggagcttctgtgtatctgtgagaccctgtttcctcatctgcaataccaggactcatattctaacngggcttttgaaacctnaataanntaatgtaaggcttgggccatgtattttcttcaanaatcgttgctgtgaaagagccagtgaagtcacagagggtaaagtcaatggtcaaccttcctgattaatg

SEQ ID NO: 530 - DNA, 248 bp, Homo sapiens
  misc_feature (1)...(248): n = A,T,C or G
cctnagnaanaaaaantntnaaggggcanacatnaaaatcctgaacaacagctttaataatgctagagaggcaaacctcagaaaaatactaaaacagcatcaaaaaggaatcaaaataccagccacaattctatttcacccccccaacaattatcaaaataactcaactctcacccaaaaaaaaaaggccngcgaggccaattcagctnggacttaaccaggctgaacttgntcaaaagggggggggg

SEQ ID NO: 531 - DNA, 356 bp, Homo sapiens
  misc_feature (1)...(356): n = A,T,C or G
gatgacgaggtgcatcactgaacatccagcccccgaccagggacctattcagaagcacgaactgcaggctgtgtcccaccatggatcacattcagcccagactcagctccttctgcaaccctgccaaagagcctacgaatgacggccccatagcccaggccactctattaatgaagaagagtgcactgggacacttgaggagaacctgttttgtctcatgtttttgaagcaagagtaaaaaatggaatgcctcaaaatgctacaatccctctatattcaggtgagggagattcttgtaattctgtgggttatgacatgatattcntttaaatatttaanaacctttggttaaaatt

SEQ ID NO: 532 - DNA, 455 bp, Homo sapiens
  misc_feature (1)...(455): n = A,T,C or G
tttggacctgattaaagaagggacaacaaaggccaatttgccatcaccaaaggagcagcttgacctggagggatgaggcctggaggccgacagcaggactccgtcagtgattctttcagctcttgaaaatgatccctgaatccaacggagctgcatctacagaatgaaaaaggtagaaattcttatggactggaatcttcctcaaggcttactttgttcctgggatgcagtggtgcatagaagatagggcattgactcactcagacctggcttgcccagcatgcattgcaacaatgatgtgcaagttattaaagacatgagtgaattcntgccaaattggcanaaaaaaaaccaagagttttntacaacaaaaaactgcttatggaacatatacttctgcttgagttgaatgtgttgggcttgagtgtaagaaaatgcaagctgcaaatctaaaa

SEQ ID NO: 533 - DNA, 456 bp, Homo sapiens
  misc_feature (1)...(456): n = A,T,C or G
atatcacagatgctccatcaaggttgaaactgtgggagctcagaaaccattatcccaaaatctagcactttgacatgagaactgaagaagaaggttttaggtctctgaccttgccctgctcctcctgtctatcaatcctttgtcatttccaaagcacagaatataagttgttctctgaagtttcttcatctgcccaaatttcagacatgccaaagaagaaaacagttaccttgggctccttttctaagcttttattaactgaactcatcttgcagaaagaaagactgaaatctgtcaacacacttggacagacttttgtcacaaaatactnggntnggtnttaaagggccccaaacanaccttgntcccagggccattggnttgttattggaagcccattggaattcttcctaaagataatttattatgctccgtcaaatcatccatacttgaaaa

SEQ ID NO: 534 - DNA, 444 bp, Homo sapiens
  misc_feature (1)...(444): n = A,T,C or G
tgaaggtttgcagctccagcgagcctaaaggaggagccaggcacagcggatgaggaaatctcctgcccaagaagtggcaggaagactcctctccctgctcacacaggctcccaacatcactcccaggaaaacaagtgccatctccccacaagactgtgagctctgagcacagcagagactttgtcagttctgttcctggatgttcaccagcacatggcagcaaatcctgagagctggctgcagtcagactcttctacctgacccaggagtgaccggggcacagagctgattccagagaagtctcctctaaaacaaggnatgggaaccacttttttaaccggcnttgtttgccttttacagttgaggcactaaattcatgcatgagcggcctgggttcaaaccctcactcttgccacttcttggctgagtgacctagaaccaagc

SEQ ID NO: 535 - DNA, 502 bp, Homo sapiens
  misc_feature (1)...(502): n = A,T,C or G
cagaaactgaagaacccnattggaaatcggnnggaaatccggnnttttaanttaacnnggnanccnntccnaaagtcctnggaattttggcccanggttttttgatggactccttcccaaattttttaagtttaccggctggaaaactggatggctggcccgatcggccttcgggaaagccccggtaagaaccatcacgggatgccgaagcttttaaggtaactcttcacagtggganggacanggaatgccaggccntntgaagcccaaagcttaaagccatcatattcccggggacctgcacacattcaagatgggccggntcctggccttaactgatgacatttccanccccaaaaagaaatggaaaatgggcctggttcctggccttaactggaggacattattttggngaaaattncnttttcctgggtcatcctgggcccaaaagcttcccctaattgagcacccttgggaacccccaattcttggctggccaaaa

SEQ ID NO: 536 - DNA, 448 bp, Homo sapiens
  misc_feature (1)...(448): n = A,T,C or G
cagggaactgaaccagtgggaggaagatggggcctctgatgcctggatgtgaagaattcagctaaaattttcaatagattgctgaagggccaactatgtactagcatgagaaaatagaatccctggaactgcagacacagaggggttcacagccactcttttccaagaacctctctatgtgctcacagagaaagagtgggggcaggactagggtacagggaaagctaccctcaattctacaggagggagcagatgctactaatggaaaggcagagagctcttcaaaattacttgtcccttaaaagaacaaaagctttaaattgctggggaaagaagnaccatacactgtcatgctggggggcatctgtatcttgaggaaaatgttaaagaatgaaagacttcacccctgcagaagaacagtaagtgatcctagacctggactatcaga

SEQ ID NO: 537 - DNA, 489 bp, Homo sapiens
  misc_feature (1)...(489): n = A,T,C or G
gnanaactgatgacacagnggngntccaaaaatnaccncccgcncaggggctttttgnttggatttccggaagaatcaangggcagctgcaatgactctcccgcccggtattattggcattggcagcacttattggcagctggcagaacccagaatgaatccacagggaatgcctggtagtanccaaatcaagtaccaaacaaaatccccgaaatggttcaaaccagacagcttcgacttttgggcacatgtgtatgctgggagcacccagtttctagtcccagaatacnccaaaaaaataggaaaacctatgtgctatgggctttgatagggaatgccagtaattagtggncctggtcttcaaaatcattggggatgtaaaanactgcaaccanaattgctttntgagtaacctgaggcataaaanagctgctgatataagtcaaagcttgcctctttttggngggccnccaacatctggtattttta

SEQ ID NO: 538 - DNA, 315 bp, Homo sapiens
gcagggagaaaggaaatgagaagcgtacggaggtcgagaggattcagagctgtctactctttaatcagaaggaattactgaggagagttagaaaggcgatgtgctcaatacaaaaccgggactgggatgagtatcaagttactgcaactcgcttccgcccagaacaacaaacgaaggtgtgtagttgggaatgagactctcaccagtgctctctgctgaagtttccggtgcatacctcccacggctactttatttactgcagctggccaaagttttatagcctgtttcatgtattaaaattcaaatgtggaaaac

SEQ ID NO: 539 - DNA, 307 bp, Homo sapiens
  misc_feature (1)...(307): n = A,T,C or G
gctgttgctacccatgtgagagtaaagaagggaagttaaatcagtgctgctttccttgatggttccattgatccaaaagcccattgaagtcaataggatttcgtctttagcagaaatgctgcacttagattatctccataggaaagtacagaaaaaaaaaactgatcgaaatagctgagttactttcaaaccaccagcctgctttatttttaaacatattagaagtttcactaatctttaaagnggattttgtncactgagagtaatacttataataataatataatgcattaaagaagagaaaact

SEQ ID NO: 540 - DNA, 442 bp, Homo sapiens
  misc_feature (1)...(442): n = A,T,C or G
agagaagagaaagaaagagaactccttgaacttgaaaacagaccatcaatgagacagggtctcactgtgttgcctaggctggtcttgaactcctgcattcaagcgatcttcctgtcttggccttccaaagcactaggattacagatgatacaggttaagattaagctgtttctttcatgtgagtctcatcactgagatctgattccacctacaaaggttgcctctagggctttagattgagatgttaacatggactgaactgtgtccctgcaaaattcataccgttgaagccccagctcccagtgtggctgtagttggagataaaacttttttaangganggtaatcaagcttaaatgaagtcataaaggnggagctctaatccaacagggtcgatgccctcataagaagaggaagagacatcaagagtgcacatgcacaat

SEQ ID NO: 541 - DNA, 469 bp, Homo sapiens
aaatccctgctatgtgcttgtcacaggagaggcgctcaacaaatgtcagctgaatgtatcaatagaacccacacaagttcaaacgtcacattcaagtaacaagatgtttagctgggcacatggccactcaaaatgaagacttcattcttggcctgccttgcaggaagatatggccacgtgactgagatctggcctatggaatgtgaatagaaatatattgcacctccccctttcttcttcttctgatcattttatccagtttcttggaacttggatcggctgctgaaactccatctcgtattatgaggggaaaggccatagtccactagagttactggtataggaagctggaaaaagcctgtgtccccaaggaattttttgagcaacgctatcatgtcactcctggattgactgcctacaagacatttttaaatgtgagataaataaaccttcatatttttaatcaaaa

SEQ ID NO: 542 - DNA, 470 bp, Homo sapiens
ctacttcctacagggtgagcccaggacaccaggacagagctgctgccacctgcccatgtcttccaaaagcgacattttgagctcattactactagatgtcacaatacagaatagggtatacgtcgtagccggctctcagtcccaaaagcagggtatggccatgcaggaaataaaggttacagagtgctgacattatgctgatgacatgctgtcttcacccaaaaaagatgcagcaaagtctaaaactggaaagagctttggagatcaccaacttaacatctttggtattttaaagacggatgaataggtcaaggtgagaaatgagttctccagtgtcatccagccctttgatatcacaggcagagatggaactactccttcccaaccctataataataaaaatagtctactctcctcatcccacaccctttcctgatatatcctatgcaaatgcacagaagatactttgg

SEQ ID NO: 543 - DNA, 459 bp, Homo sapiens
gtttatgagcaggaaccattgcttaagaaatactcaccatcaagcagaatcatgagggacagagcaccatgaactcagggagcaaagagaacactgtgggggtattcttagggatggaatctccacatcaaatccattggcaagacctggatgttcttggaaatgtgaaacattgaaaatgttgaacattaatcttctcctcatctccagtatcaacacccaactgaggccaccatcatttcttgggtttgggtggacaattgcaacagccacctatgactgctgtgactttgtctatgactccagttaatccatcctccactccaccgcctgaatgatctcttcaaaattcacagtaggtaatgacaccccagtggaaaatgctgattgccttctacttagaataaatcccaaattctttactgtggcctataaaaccctcagtgcaatcctcaaaga

SEQ ID NO: 544 - DNA, 479 bp, Homo sapiens
  misc_feature (1)...(479): n = A,T,C or G
atcctgaagtcaaccagggaactgggtggctctttggatgnaagaaaanatttaaccatcagagtaaagtgttctagagattaatgggcttgctgtttggcaaggtccatagacgtcctttcctgccaatacaaatatatatattgttgaagcacaagactatatccacagataggattacatgttaactgaaaagattcaaggaagagaagatgggccatcaatgaaaaatggtggttacaatgaagcaactgatttcacagctaaggcgagagcactgcacttcctcctcatgctttctggttgntaaactcccactaagaagcatgaaaaagagcaagatgcacttgaggagataaagcagacctttgaagggaaaccaaacatcagttcaagttgtaacttagagaccagaaaagatattccaagtttttgtgaagnttaaaatgtgctcttttgtatggaaaaaataaatcctg

SEQ ID NO: 545 - DNA, 408 bp, Homo sapiens
gaattgcaaggggagctgtgggcttgacagtgctggcagccattgcaactgaggatggaattaacatggaacacaacagagctggacgtctgagccctaaggacggcttttgggatctcaaatccagctatgcctgaagacctaaagctagaagctcctgtgcttttcagttacagccagtaaatcctcttttttggcttaagccagtttgaattgggtttctacacagcctgaaactgctatgaagtcaaaggtagtgttagtgctggaagacactgcatggataacctcctcaaggggccacttcactttcaccaccaaatgccccttttcaccgatccttgtctactgctaccttgtttgatagattatgtctaccaaaaataaacaaaacccgcattgagaatc

SEQ ID NO: 546 - DNA, 422 bp, Homo sapiens
ctgttattgttccttgaaaaacagtataaaacaatacaaacactcattgacatggacccaatctattcttgactttttaactgatggatcacattataatgcagaaggttccttgccctgatgctgaaaacagacttgcgaagctgaaaatgataagagtatgacttttagttttggaatgttaagaaataatatactgtcaaatcattcaatagatgacattgttaaaacatgaaacatgaatatgtttcgctaaagcatcatcgtacaattgacaattcttgtctatttttacttttatttgggcagcaccatgaacaaacttgtggggccccacgtcccagccacggatggtgcattggctgtgcctcactctgataatggccttcgtctgaatgaaattttcagtttccaaagacttt

SEQ ID NO: 547 - DNA, 322 bp, Homo sapiens
  misc_feature (1)...(322): n = A,T,C or G
cnaaactgggggggggtcttttaagccgagatcgcgccattggactncagcctgggcaacgagcgaaactncgtcttaaaaacaaanaagctgncatttggccccanatttgngccttgaaaccaccaccgggagggcggttcccacaagcttcccgggttgggggctgaccaattctgccaggaaaactagggcgacattcccaaatcatccccttgacagccctaattcttacttttaagaaggntcttggtaccatggaaaaccgcaaatgcccggtaaaggcagatttaccatgaaagctaataaagcttctaacctc

SEQ ID NO: 548 - DNA, 406 bp, Homo sapiens
  misc_feature (1)...(406): n = A,T,C or G
gtgggggtctnttcangaagggagggcagaaaagaaagaangganggtggganctcaaagcttggggaacccactgggaagagatgggaattagaaagaagaaggggtcccgaaccagacagggacctcaagggcagaaaaccaattatggtcaattaacttcttcaactcagcaaatatttttcaaatggtcaagcacatggaaaggagccatatgaatgacacaaacatgactggaaacctctgtctgcctcccagagcttcgattcctgcactggggtctttcaaactcaggtaccaaatggcttcctccgaggggaaaaactaagtcctgccagatgcccctgggtacattactttggggtccattcttaaatttaaattaaactacttttatcccactatt

SEQ ID NO: 549 - DNA, 422 bp, Homo sapiens
gaacatcattccttctcatgcatggtctgcagtgatgggaactgaatgcaccagcagcagccatatgagcttggaggcagatcctgctccaattgagactcagctgagactgcagccccagttgacaccttgattgcagcttcataagatcctgaatcagggaatccatctcagctgtgcctagactcctaacccgtagaaatgcgaaaggaagagtaagctactctcacctgggaggtccagctggtgaagaccacaagagactgtctccagtgggaaagagccttgagggagctcatttactgcttccacatgtgtggtcacagaaagaggcatcatctatgaacaagaattcaggccctcaccagacatcaaatctgctggtttcttgaccttggacttcccaacctctggagctgtga

SEQ ID NO: 550 - DNA, 330 bp, Homo sapiens
  misc_feature (1)...(330): n = A,T,C or G
atttctcatggaaaaggacggnctggagcctttgaacaggggctggggtcttccttctgggtcagcaatggggggnggaaaaccgaacgcccttcgggggaaagggagggtcaccccaagatcttcaagttcaccgaagtggcagcctgggattcaaggtccctgcctgccttccagaacctgagctctgaaacgctggactaatcaagaacctcttggcccttgaaaaatgaggcctattgaacaaagacatttgtaagaaaagggactattacaacctagtgtaaagtaacaagcaaataaaaaatgaaatggcacaactcctcccac

SEQ ID NO: 551 - DNA, 459 bp, Homo sapiens
  misc_feature (1)...(459): n = A,T,C or G
tgtggctgggaactgctgtagctattctgagaccacgagaggagtcactcggaagggaaagccgacatcgagtatcgggagatgaagggaaatgaagagacagcaactacccgaagccctgacggcatcgctgggctgtcaatcaaccctctcacttctctaacttgcaacttacttcacgggatgtttttccctatttaagccattttgagcagggtaatctgttatatgtggttgagagcagccaactgctatactagtctagagagctaaacccaggcacccccttaacaatcgtcagtcagagtgggtcaggacaataagcacaacctgcttttccagactcctttgtcctcctccctgaatgctgaagaaacaaccttcccttctggtcttcatcacacttctacacacccatctgcactaattccactgtgctgngatctgctttgtatacat

SEQ ID NO: 552 - DNA, 472 bp, Homo sapiens
  misc_feature (1)...(472): n = A,T,C or G
ccacagatccatgatgtgcagttctcttggagcaggcgctggcttgtgctggtcactacctttccacaagtacttccttgccaagaaggccgaacaaaggttcaaacctgaagttaaagggggggaaaaatgaaagggaaactttcttgcaccaaagggaagcttgccccaagctttttgtgggggggaagaaaaagtgggatgaagggagggggcttgaaagaaagcctgatgggcagccctgggatgaagaaacaagtgacccaagccaggtgggaccttccagggaagtatgcctgnttttcctggcacttcatcactgtcatgtgcaatgacttctttcagggcttgcccagacccgacccttgaaacaaaactcttgactttctgccatggatctctttggggcccangactggtggatgcctttgaagttttgtattcaataaaactttttttggctggtgataat

SEQ ID NO: 553 - DNA, 440 bp, Homo sapiens
gatgggtgtgtgtggcccataaatcaactggacgcacttccctttgtttgcacactgccaccgacacaggcttgctatgaagaagaagaaattttgctcagaggaaactagaaaacctgaacgtgtacacaatgctgacatattttgttgctttcacccctcttaagaatttctaccattcctttgagaagttgattatttttaaaactgtgtatcattttgccttcttgggcaaattgcacagtcaatgatatgtttcaccgagtatgtaaatcccttttacatatttcaaaataatatctaattaaaatgtcaaggttatagctcatgaggctagagtggacagggctccaccccctccctcagcctctcaaagtaacatttaaagtatgtcctataattaggagcaattataaattccaattaaaaagaacctgcat

SEQ ID NO: 554 - DNA, 516 bp, Homo sapiens
  misc_feature (1)...(516): n = A,T,C or G
cnnaacttgagggtngagagaaatgagggcatngccnataacttggaagttcttnaagtttacnatgggaaagccnggcccggtgccagtggcatgcccctggtaattcaccacaacttcatggagattaaagcagggagggaccttcttgagcccaaggaagttttgaggnttcaagtgagctatgatcatgccactgcacttccaacctgggcaaccagaagcaaaaccctgtcaatcaatcaaagcaagcagaccaagcaagggaaagcaagcagcaagaagcctctgcatgagctcatgaatggctgctgtggaaaattactgaccgtcaccagctgaataacangctatctggagagtaaagccagatgaaactgatgntaaattatcaaatgtaccaaganttttgggcttnctggccaaaaccttcattgggaacttagaagagaaaaactggaaacnnccagagcttttttttaagcttctgagcccacangctggtcctacatccct

SEQ ID NO: 555 - DNA, 407 bp, Homo sapiens
  misc_feature (1)...(407): n = A,T,C or G
gactctggggagctcctgcattaagagctnannngattngaacctnanngaanaaactgcngannnagggagnattgaanctactntgtccactggaccttgttcccangctccggntgaagctgaacactccgnatgatctccctgccaccatancangctatgaagttcattacacatgcangtagnagacaatacagctctgcttccatttctgagcacctacggtaagactgccattattcagtgtgccancctgtttccaagcctacaatgtatagttcctctagtacgtaaactcattttttttctcagagagccnagnagagacacaggcagttttcttttcaaaatgtgccananattccaaaacaatctcaaagcattaaaggctatgtgcacaaagt

SEQ ID NO: 556 - DNA, 368 bp, Homo sapiens
tgaaaacaacttgggagtagtaatgaagatgaccagaggccagcgagctgaaagtgtttccagcaaagcagccctctgatccatatactttagctacaacttacatcaccaaggtccatattatatactgtgatattccagctgcacagcgaagaatccgtcacctgctgacaaaaacaaatgatgctgagaggtttgggcacaataaagtggataattatacacaggcactttttcccatgcagcattctttaaggatgtgccagagtatcttgaaagatctttgaagagctatgaactgatagaaatacaatcttggatttattttttaatcatttgctagttaataaaattactgctttcaatgt

SEQ ID NO: 557 - DNA, 340 bp, Homo sapiens
ggtctcgctctgttacccaggttggagtacaagtggtgcaatcatggctcaccgcagcctcaacctcccaggctcaagcactcctccctcctgcctcagcctctcaagtagatgggatcacagggtcttactcctacttggaatatagatgggatggagctgagtggctaagtacaaagctagaagcagcctggtccagatggctatacaaacccgaaactgtctacacccagactttattcttctacaaccaaattcctcaaacacacaatctgaacagtagcagtgaaagggagtttaaggtgggggtgaggggagaaagggagtaatatggttttta

SEQ ID NO: 558 - DNA, 377 bp, Homo sapiens
  misc_feature (1)...(377): n = A,T,C or G
acatgccaagcttcagctgaaactcaagcctcatgcagttttctctgcttggaatgttctctgcccagccttcacctgcccagcttcttgtcctacaggtctcaagtcaaatgccttcttctcagtgaagacttccctggcaccttgtcaacataaangtcatctggttattctctctccagcctgtggcctattttttctaaagaacttttcagaatctcatccatatcttggtttacttgtttgtaaccagtgtctctcctccagaatgtaagctccaggagagcagcacttcctccttgatgttattcctgcttcaatccttagcgtctagcccagtgcttaatacagatttgttgaataaagatccgttaaag

SEQ ID NO: 559 - DNA, 466 bp, Homo sapiens
  misc_feature (1)...(466): n = A,T,C or G
gcacccagtgactttggcagcttggtaactttaggaaacaaggcgctcccacccacgctctcccacctctttattctgctgtgtctgctgccacctccagcgccttttcaacgcttccttctcaactcccttctccatcagtgcatacaaagctttccgcagcatcaagtcccgatcatggaaaccccacattcctgtggcaaaaaagcataatggtgaatggaggactgctttcaagactcaccaagggaggctgcatgcaggaggcagttcccatctccagtagttgccaaaggaagcagcctctgagaggtgggatccacactcacccaccagttcaaacgccctgtagaaacaagatagtggangaaaangagaatattcatgaagcccttnccctttctatttttgnaaaaanactccaaagcagcctcctttaggaggcctacccagaataaaaccatcc

SEQ ID NO: 560 - DNA, 455 bp, Homo sapiens
  misc_feature (1)...(455): n = A,T,C or G
gatggtggggaacatggcgagaccagtgacttccaagagcctgtgcccattgctgcacttttttttgctgtgaagtgagtgccttgatcagaacagtgaaacggcgttttgaagactcagatacagtgccaggctaagaagggagctgctgtgttttctggggtgattggtcctggctaccaagggaaaattgggctgctactccccgacggagttacaggataccaaagagaagagtaaacatgacccaagaaccctacgtcctcttctggggaaggtttagtgtgtctctggttttacccaagatagttgaatcaggtgcagagggaaggaactgggagcacacagcaagaaagtggctgttcacaagctangacctgcccttntggcccttggttttgggcnttccngcctccaaaattggganaaaaaaataaatntttgttgtttaagcc

SEQ ID NO: 561 - DNA, 56 bp, Homo sapiens
atgctactatccttcaagatggtaattaataaaagacagaaaaatgcctaaacacc

SEQ ID NO: 562 - DNA, 397 bp, Homo sapiens
aaagtttgttgactcatgacctagatgactgcaagagcctacaatgaagtccctctgcaaacagaagcaaaaggcacagtctgctcctcctaaagatggtcattttctgctgctatggcccagtttgtgccttcaaggactgactgtgtaaaaaagagcccagaaactctttgaactgacttacagtggcttcttcagcagtcagctgtaacgatggctggagcacctggtacctgagtgagggccaagaatgggctctgcatgtgccctccctcaacaattgcccaccacccattctcacacaaatgcagtgggggatgaacctgtagggatgggtaatcagcctgaaaggaacaattttgcatatgtgtaaaatctgaaaaaataaattattatt

SEQ ID NO: 563 - DNA, 358 bp, Homo sapiens
gtggggtctttcagatccagtaaagaagatcaccctcaccgatcccagtggcatcatcccatcttttgaaggcctggaaagaacaaaaatgtggagaaaaggaacattttcttccggtttgagctgagacatcatcttctctggccctgagacatcagagatcttgcttctcaggtttttggactcatgccaggactcatacacattattagctccctaattcacagcccttcagatttagactgaattacaccatcagcgtttctgggtctttagctattaatagcagacagcagatcatgggacttcttggactccgtaattgagtagtcaattcctataataaatctcttcatat

SEQ ID NO: 564 - DNA, 351 bp, Homo sapiens
  misc_feature (1)...(351): n = A,T,C or G
aactgaggtggcagtctagtaagatttaacgatactgtctgactggagctggaaagcagtgagtatggctgctatcggagaggagagagaaaatcaatctctgtgggctgctattatccagaagaaatggagagctcccaatgaccaggcattccaccgagcaacagggcttacttgcctctgctctcattgaaaaccacacagagcatgcaacactttgctcactccaaaactttatgactttcttcantttcaagcaatgttgaatgctgactcaataagatacaaccaaaacaacttgttgatgagacaaagctgagtttattttttaccatggtaaaagtgaacgct

SEQ ID NO: 565 - DNA, 433 bp, Homo sapiens
  misc_feature (1)...(433): n = A,T,C or G
actcccccaggagcacagcaagttctccagggtgcggagaggcagtggagagtcttcaggaaaccaggttccgaagcctcaaaacactcaagttctcttttcctacaacagaccagcctgtgaatgttcactaattttcaaccaaatgatgtgctgtaatcaattacactttaattactcaatccagaaaaaagcgatcacttaaataagcctcatggtcagagaattttctaaaaatttcaaattgctttttttccctaaaggaatgtaataggatgacaataaaagatcctcacgaataaaaatatatgagaataaaatcctggaagtaggactgtaataaaagcataactccaaaaaaaaaaaggggccngnggggccaattcagnttgganttaaccgggntgaacttgtttaaaagggggggcccccc

SEQ ID NO: 566 - DNA, 40 bp, Homo sapiens
gtttgcatcgccagcttctatatattacggcctttttttg

SEQ ID NO: 567 - DNA, 398 bp, Homo sapiens
  misc_feature (1)...(398): n = A,T,C or G
ggtgaatttgggacccaaacagttaagcaaccagccaatttgcttccctgctgcctcccagccaaggagatgaatggaatgcacatgaggtcgcttggcaggcatccacattcctatgggaatgctgcagcagccagagctttgggacatgaagaagcaaatgtgtgggagttatggggcaaactgcaaacaatccaaagtcccgaaaaaatgcatggagcctctttggcccaaggatgctctgcagaacaccggcaaagaccctgcccttgcccaaatcaatgatagaggcaggactcggcactgccctgttctttcttactgctgccaaggccttgaatcgtacaggccacttncaggactactgnggatgtgagccatttaaaagaacttcaaca

SEQ ID NO: 568 - DNA, 340 bp, Homo sapiens
atataagaaagattggagaactgtgtgcctggcaattgccttgctgaaaggaagccctcagaaaaagttgtttgatggtgagagctggccaagccagaaagacaaaccaagcgactttgagtgggggctttgtgtcacaaggcatcagtagacctggagactgagttcaggcaatcaatcaatcaatcaatcaatcaggcctacagaatgaaactccaactaaaaactgtggacaccaaagctcagctgatttcctggttggcaatactccatgcatattgtcacacatcaatgccagctggtcaagtggtagaggacaataaaaagttttcacctttgg

SEQ ID NO: 569 - DNA, 434 bp, Homo sapiens
  misc_feature (1)...(434): n = A,T,C or G
catcagagggctccttggaaatgctagataccaggaagaaagggaacctggttaaaaaggaaaaaantaaaagggaaagccttttgnttccaccaattcttcaaggaaccaggaaagggaaaatatttgggaaaaaggtggttttgggagggaaaggaaaaagggccaaaagaaaantaaaaggagggcatttaagtantcccgcttgcaaaagctttggaaaaaagaaagccaatggaaagggatgccacgtttttaaaaggtccggtaggaaagaanggaaaaggaaaaaaaattttaagggaaaaagccgccatgcttgaaagaaaaagggggaaattantgggaaggaccaggaaccatgccaaaaggatccaaggaaaaaaggtattcttcaagggaaaattcaaaaaaggcctntttcccaggaaacc

SEQ ID NO: 570 - DNA, 483 bp, Homo sapiens
  misc_feature (1)...(483): n = A,T,C or G
tgatgatacacagcaggacaaccagtcctgaaaaactttgcaaaattgatcataccctggtgctcctcctttaacagacatggcagcccctgaattccagatccagccccgcctcccaggtctgctctatcttcagccttacaggaaccttgggcggtgtctcctgactcaaccatgtgtgacaagaataccagctttcccccatctctgagcttctaacgttttttatgcctcccccgacttcaaaagtgttaagagttcccatggggatggtgaaatgggccattcctgaatggtataataaatctcaccgaacttcaggcatgcctgtcatcagccaagtcctctggtggggctgctggcatttgaaactgaggcttctcacaatggatttcaatttnttcggttctcaagtcaaactttaagttantttcaaggggtcactcttgtgttaattagcttttgangggagagtcacaaata

SEQ ID NO: 571 - DNA, 676 bp, Homo sapiens
  misc_feature (1)...(676): n = A,T,C or G
agatggggtttcgccatgttgcccaggaggggcctcaactcctggggcttcaaagtggaatcttggcttccccaacaacaaccaacccggccttcgggccctccccaaaagtggcttgggggaatgaacaagggaagcccttcttctttttccaacccaagccgggaagggaagggaagaacaaggaatgccctttccaagccttggcttgggcttgggtcccccaagggaacccccaacttggcccacttggaagaagccttgaccgaaggttgggtccgaagttgccaccgccaaaggttattgttgccaagcctttgggaagaagggttgccaaagtggacccgttgcccttgaagggtcttaacggggcccccaaaatgggcaagaatgaagggggggcttcaaatttccaaggctttggtcttgtgggggggtggcccttcccttgggacacaaagggaacttgcccaaaccccttgtggttggaaatgtgaagcccttcaattgnaaaaggaagaacaaggtggaagaaaagccccttgaanttgccttgggtnggccttgtaaggccttgcnttaaacttgtnaaatacaagaatnaaatggtncccaaaagccaccttgggtggggcttgtggaagcctccttcaaaccttggtnaaaataacaaaaa

SEQ ID NO: 572 - DNA, 390 bp, Homo sapiens
  misc_feature (1)...(390): n = A,T,C or G
ttcaggaactgagtgctggccctggtcacattaagggagccaactggtctggctttgggtggttangtaggaacattttaancaagcccttcttcnattcttgggcaaangttcaaatttggtcaaccaaaagccgcttggcattcagggaataaaggaaaccctttcaagccaaagccaaccaagtggacctaagcctggtggaatcctaaatggaataaacccttttccatttttcatttttcattaattttaagaattttaataatttaccctttctctttcttatttaaaaatggggggcctagtttgtcccattgggaagggaggtcattaatgaaaaattattctttcttaaaaaataaaaatattatttcaaaatattttttt

SEQ ID NO: 573 - DNA, 606 bp, Homo sapiens
  misc_feature (1)...(606): n = A,T,C or G
ggattctaccatcaagaaaagaggcccaaactttctattcattcatgggtgggaaggtgaangtggtcttggagtggaactggtaaaattggcagaaacccaactttggaggaaagcttgggattttttcacccttgggccccaaataccttaccgttggggccttgcaaaggaagccacccaaagcacccaagaaatcacattattggggacctatcacccaaaagaagaagaagactacttgcggcggaaagacccagactattcgaagaagctggaagaagaaagaaggtttccccaagtgggcttgaaagccttgcttgtgcttggtatttcttcatcaattgtgggtgttttgtcctaccctggacttgngggaaaaataaantcgcttgtttgggttaaagtaaatttaagcagccaaaagcaattgcttnccaagccgaaggncctccttgctttcaaggaaaagaaacccaaaaccacttaccccttgaaaggggccaggcctaagccctgcaagccccttncctttgcangggaggcctttccctttgcccctggggcntgnttnttnacaaaaatcgggggtcttggggcttcaaa

SEQ ID NO: 574 - DNA, 468 bp, Homo sapiens
  misc_feature (1)...(468): n = A,T,C or G
gagatttctccctctgcgctgaggatctcactgtgcacctccagccctgggtcctggtgggctctggtggccactggagtctttggaactgcctccctctggctctgctggggttggattcgggcatcgatgtcacacccagcaggaacaactggggccactggaggattcccaaggacacaggttgtccttttcatgcaggaagaatctgaatcgtttccatccagtttccccggcatgcagcagaatacaacacaaggggctgcggtcttctctgactcttaaggcccttggaagatcctgttctgccaaaatcagggtgatttgggcaagcatccttagggctctggaccttaatttcttttcctgggtgattgattgacatatangngtcctaactcacataagttgnaaaacaaaatgtgggggaaagggcnttganaccaaanacaatgttattgtcctgaa

SEQ ID NO: 575 - DNA, 403 bp, Homo sapiens
  misc_feature (1)...(403): n = A,T,C or G
aaaaggctaacattcttgaaaaagagaagatgtatccaatgggcgccttttcttntgggaatcgagctgccattcganggacattcacttgggccagaagatcgtaccgacatggctgctcaaacgaagtccagatgcccacatacctgtgctctttgccgtcatgaaactggaaactacgcatttgctccgggatatcctgttttttaatttcacaacgagatggaactggctgaaactggacaacaccattggaccacactgggacttatttgtgattggcctcattgttcctgggctgattttgttgcttagaaatcaccaggggtaggatgcggatcacaggaaaacctgctcacaggaatcaagttcacttccangnattccccactaaataaacaag

SEQ ID NO: 576 - DNA, 469 bp, Homo sapiens
  misc_feature (1)...(469): n = A,T,C or G
ggaatatagagggaatatgaatgacatcacagcagctgccttggagccctggagcctgaagacatttgagatggatacacctaaggagaggaggagaaggtggcaggcagatttgaaaaaaatgtggattaccattaaaaaaggatttgtaagcaatttcagaaatataatctccaagcctcaggaattattttacccttactttttaagaactggtattattatactcataatgagagtcataaattatgaacaagaagaaggttggttattattatttgtttagtattaccagccttttcaattccacacaagagggtaacagaaacaaagctgtgaggatacccttgcagttgnacattcttgggaattttgcatttaacaagggaaaggatcatcactgnaaatatattttcaanttggnaacaanctgagactcataaatggngattntntgacacataacaag

SEQ ID NO: 577 - DNA, 371 bp, Homo sapiens
gcccacactggagaagcggcaggcctccactgaatggtcgaggtccttaactctcctgccagtcaatactgtctgcctgtcatattgccctaaccttggtgaagacacttgtcaaaatgaacagcgacacatgcttctgactcttaaagaactaacagcggatcctggaaatggaagctgggtagtaatggaagctactctcctacacaactgagatttctgatcccagacccccaaatataggaataaatgagctactgaaccacaaaacccaacacaaggtcacacacacttgtaaagtggctaactgctttcattgttttgcataaaatgtgtattctgcaaagattattattaaaaataaaacaagc

SEQ ID NO: 578 - DNA, 345 bp, Homo sapiens
  misc_feature (1)...(345): n = A,T,C or G
aaattccaggggactaatattggagaatgaaccnaggctgggananccancctgcaaaattccaaaaaggacctccnggttggttngtctacaacccagccatcgtcangataacattagactgcgttccaggtgggaccatgacttcaaggatagcccccagaccaagggcccgggccacctaagcaccccagcacccacttcctggcatgcctcccactctaagttcccctttataaaccacctcttccacaggtcgaaagtttggaaatcgtcttttaagggcattgaagcttggccattcccagatcttggcatttgaataaagtaagctctctgttcatc

SEQ ID NO: 579 - DNA, 501 bp, Homo sapiens
  misc_feature (1)...(501): n = A,T,C or G
ctacttcctacaggggtgagcccagggccccanggnagaactngtggccncnngccnnngttttcnaaangcgacntttngngctcnttactactagaggtcncaatacagaatagggtatacgtcgttgccggctcttcagtccccaaaagcaggggtatgggccatgcagggaaataaagggntacagaagtggcttgacattatgcttgatggacatgctgtcttcaccccaaaaaaagatgccagcaaagtctaaaactggaaagagctttggaagatcaccaacttaacatctttggtattttaaagacggatgaataggtcaaggtgagaaaatgagttcttcagtggcatccagcccctttgatatcacangccagaagatggaactacttcnttcccancctnttattattaaaaataggctactnttcntcatcccacaccctttctggatatatcctatgcaaatgccancagaagatctttgcaactggg

SEQ ID NO: 580 - DNA, 443 bp, Homo sapiens
  misc_feature (1)...(443): n = A,T,C or G
aaaagaaacatggaaagaagggtcagggagttggaagaggagagaacatgacatgcgatacttccactttcttaaaggcaacactacataagacatctgcagcgctgtgctggtcaacgctagattggtggatgctataatggaaatggacaaagggtctgtgtatcggatgtcaacataccatgccaagaagccatgtaaatgcaccaagagatcctgtttttgaagtctcctctttaacacacagaatcaaaatggcaacatccatgatggagaaggaagagggtccccagcccttaccagccaggagaactcttgatgacctttcaatggggcagncatgccttggcatcanaaacctcaagggagttggctttttttccattatggncatagtctggtaacaaatcatctgtttaaaaataatatataactcgagctcg

SEQ ID NO: 581 - DNA, 336 bp, Homo sapiens
agaaggaagcagatgccctacaaagcccatgtatagtcacccaacaaaatgtactggacgactgccatgcaccagccattggagctactagctcctgagaagccacatcctgactaaatcagcagaagccacgtcatccagagataatgggatggagacaggggtgcctctgaggctgaggtgactcccatagggatgggtagctaaaaatgaagcatagagtggcccgttcatctttcatcttccccctctctcgggattgctttgctttgctttactattttggctcctgagacaagaagctacattccaataaagctttcttaatggacactg

SEQ ID NO: 582 - DNA, 483 bp, Homo sapiens
  misc_feature (1)...(483): n = A,T,C or G
agaggctgtgatnnctggaatgtttaatnggntggntgattggacttatgcctttggtcagcagctcaaagaatgctacaattcactcttctacaaagcagacatccagccttgatacccaacccagaactctgaaagaatgaaaatttgccatctctagcaggtggaattatcagaggcctctggaagctgccatggaaacaagctcactaaaggcttcagcaactgctcagatatttaatttcacccacagtgaatgtaatccaggcaagaagtgctcacaatatgaaaacattgattagcaggggactgcatgtgtaccttgctgggtacaggccccactttctttctctttgaggacgcttagcttgaacattccanggggaaagacatccaaaaagcatcgccacaaaccagntgggaagctgaccaanaaaatcatgggttctgcccgcagggaggaaaacacagggtaaatccttt

SEQ ID NO: 583 - DNA, 294 bp, Homo sapiens
gactgaggctacccaacaaatttcccagccttcctgcagtgaggtgggagccaaatgactaaattctgtgtgttggagagataaatgccacttctgggcctgacccctatggcccctgccatgctggcctgaagaagagggtgcagtggaggatgctgaggccatagggaatggtggagccattagacagagaagctggtcccagaacttctgcaagaagcagagtcctcctttcatccataatgaccaccactgaattgacagcacaggaaataaaacgttactgtgttagcc

SEQ ID NO: 584 - DNA, 66 bp, Homo sapiens
  misc_feature (1)...(66): n = A,T,C or G
nttggacnactatngtgganccantgggcactgngcngngaaatgcagagctgaccaggcatgagc

SEQ ID NO: 585 - DNA, 343 bp, Homo sapiens
accttgagaacatgcctggactaccgtgctggaggaggacagacacatggagcatagcccgagtcccccacccggtcatcccagcagaaacggtcctggaccagccaccaccagccagctcccaggcacatgaaggagtcccgccaagatcagcagccggcaagctgacccacagccaactgcagacgcatgagcaagccttaagcagctgaaatccaccaagatcaactgaagtctccagttctgggtgccagtatttcttgttgtatgcccagaagtattgtggctctttgttaattgattaattaataatcatggataatataacagatcattggccaag

SEQ ID NO: 586 - DNA, 409 bp, Homo sapiens
  misc_feature (1)...(409): n = A,T,C or G
tgtggggagctacactgcnttaagtcatgaacngccaccttccgtgacgctcacagcccttnttgatgtcatccagctcttatccacnaatcctcagctcaccatggaaatgcggatttccccaccttcaatctgccccatcacaccagtgatgtttcagttcactttgcactggttcttctttccacccagaacactcttgtgccaggcggacccacaacgagttctctaattaccttcaactccttgctcctatgtctccatcccaacaaggcctacccagaccttccaatcgactatggtaactgcctgtctcctccccacccagggccatctccagaactcccaacccccactatttttctccactgtcttttctttatagtactttatcttttaaaaaggaatg

SEQ ID NO: 587 - DNA, 396 bp, Homo sapiens
  misc_feature (1)...(396): n = A,T,C or G
atgcanaaaccacggcccagggaagacgcagcttgagcaaggtcaccggcaggccatggttttgcgggaggaggagctacagtcagtctgccttggagctcaccaccgtgtttggcccatggtagatgcccnacagaanacacanncgntgttganggctcctgtnaagganaanctgcnntacaagaaggttgagtaactancccatcactcagctagaactggccaccancatggatnccanatagccctactccanagttgcccatgctattanccgtgacgccatgctggctgtccacacccatgcctttttcctgccttaatcttgcaatgattcataaggaaaggccatattatgacacagctngaaggcagncatctgcaagccaggac

SEQ ID NO: 588 - DNA, 410 bp, Homo sapiens
  misc_feature (1)...(410): n = A,T,C or G
accagccaacacttacggaaaatagaacctacgttgaaatattgggggctggtttcctctatacaagaggagtcatgaatatttatgaaaggagaaatcgcacatgcacaggatgacctgcctgcagaaggagctacccactgaaggtcncttctctgctgagagctggacactcattgggatgaactgcctgtggaaaggagctacccactttgggtctctagagagctgttctgttgctcagtgaagctcctgtgcatcttgctcaccctccaattgtctgcatacttcattctncctggacatgggacaagaactcaggaccaaatggtgggactgaaagagctatgacacaancagggctcaagatttancagccaacaacnaaacaaaataaagcacaataaatg

SEQ ID NO: 589 - DNA, 335 bp, Homo sapiens
aagttccaggggctaatcttgagatgggcagaccaagcctggagacccagctgcaaaattccagagattatctcaaggtggctagtgaacaacccagccattgtggagatgatgtcagcccatgctccaggtagactgagacccaagacagccactggaatgagacacacagacattgtattcagtctaattcttgcatgccttccatatcaagtttcccctttttaatcccttgccccttgtctttccccccaaattcaaagtggtcactttggatgggaatccagccacttcccattactagttttggttaataaagtcactttctttccacc

SEQ ID NO: 590 - DNA, 405 bp, Homo sapiens
  misc_feature (1)...(405): n = A,T,C or G
gtgctcctttgacattgtccacatctggaacccagaacctccttctgcgtcctctatcccccatcccacattctctgcctctcctgctggaggaggctaacaccaactgtgcaagtctgttttgctacaagtcacactatgagaagatctgggcattggttccccatcacctgggccaggactgatcctatggacctgctcccactcctgggaaatgcggagataggatcgtccagtatgcctgctaaggctgatgttcagattaaatgagatcacagaagatgggcagctggttgcacttaaaggagctgggaaatggagcccagtctgctgtgatgggtcctggattaccaacacaccttgctgtggaccttggggcaganggcacttcaactcccaatttct

SEQ ID NO: 591 - DNA, 211 bp, Homo sapiens
ctgtgtttaacaaaggtcgtcgggggagtgactatgccccagagtccaccatgagagtgctgaagagccaaaggtgatggacccctctgatgcttccctgccatcagtgagagaagcctcatgtttatgtattttctatgccgagatttcactcaatatttaatgtagaggagggatttggctgtctaaaataaatactattattattttt

SEQ ID NO: 592 - DNA, 397 bp, Homo sapiens
agatgaagaaattggggctcacggattaagtgacacctatttttcatatcacacactacaaaatctcaaacacagtatctcaactcatgaaacattcggtcctaagatatcaagtgcaatctgattccagcctgtgcattttgacaacctttgactgctctgccaatcgccaggtgcccctctccagcccagtcagtcgtttctggctccattcataactctgccggatgcctcattagagaagtgtcctgagacttcttgtgagatatgccttcctgagacctacccaatgtgcccatgctgactcctaccagacagctgagagaccaactcagagaagaatagcaaagaaagcagaaaatgggaggctttatcccagtgcccaatccctgctagc

SEQ ID NO: 593 - DNA, 420 bp, Homo sapiens
  misc_feature (1)...(420): n = A,T,C or G
ggacctgggagtgcgacatggtggcctcaggggaaaagggctctcgtctagaccttctgactgtcctctggatcttcctggtgtccatgcggggctgctgctctgngctggccccagggcctttggccagtgtccatgagacccggaattccagcaaccagtttgacaactcctacagagaaacaggatccacataaggatacagcttcttcatatccctgtccatgacttcaccctgcgttctttcaaccaaatcaaatggtggtcagggcctcttgagcccaggcctgcaccgtattacattccaagatggcattgaaagtaacttgagggaaatcaccaaaaagaaagtgaaactggggccgggttcctggccttaactgatgacattaccttgggaaattccttcttcctggctca

SEQ ID NO: 594 - DNA, 316 bp, Homo sapiens
gagtatgaagttaaacaaacaagagaagatgaaggaggaaaagaagaagatggaggaggacaaagttttcagaagtgcttattagagctattacatgccaaatatctactctgtgggaaaagcaaatttcacatttttatcaactctgtattcctacatctgatcaagagatgttagaagccagttcttgagaatggcaggaccaccttgtggacataacctgggtcggtgaatgactgcacggagcagagtcctacctgtcaagacgtcagattatgatgtgaataagcaataaacatatattttgttaactcac

SEQ ID NO: 595 - DNA, 133 bp, Homo sapiens
  misc_feature (1)...(133): n = A,T,C or G
aanagtgtntggcatactatatgctaatccaacaggactgcggtcttatacgangaggaanactctctntccaccatganaagacacaatgagaaggctgccatctgcctgccanaaggagagccctcgctgg

SEQ ID NO: 596 - DNA, 397 bp, Homo sapiens
gtaaataaactttctgcctcatgactccttcccttcttccttctttttcaaatgctcaaatctgctgtagattttaacatcaagaaagaaccctcatgcttggaaacactgggaaccactggtgaagagcaagagccctgggaagaatcaggatttcacttggcctctgccactgacgtgcggcatgactgtggaccagcgacctgcacctcttgtgccccagtttactcctctgtgaaatgaacactcatgcgagatgatggctagactgtcaccaggtctcctatttgctagtacggtgccctctttgaccagcagaataaagatggataggtgttctacctacatacagtcatcaaactcatcaaactgtgagcaggaagagagaaaagactgg

SEQ ID NO: 597 - DNA, 318 bp, Homo sapiens
  misc_feature (1)...(318): n = A,T,C or G
gtaatccacatgccaaactgaatttaaaattcctggatttattgtaagacagaaaagccaaaaaaaaaatcacaaacgagaattttggatttcaaggaaatgttcgattgtanangacaggcncntggcaaaanangngagggctatgtnaagatnnaggcnaaggttgaantgntgctgccacnagccaaggancaccacganccaccacaagctgganaaggcaaagaaggantcttccctanaatctncanaggaagngtgggcctgncaccaccttgantntggacttctggccttcggnnctggcaaagaata

SEQ ID NO: 598 - DNA, 374 bp, Homo sapiens
ctgagaattcattctgaatatttgcagatacataaaactccaggtgtaactccaagcaaaacatgatgaaagagggaatttggataaaccatggaatgatgacatcacattgagcaccatctggtataaacatttttgctttctgcagtgaccagatgaaggaaatatggtgccgtgtgcttcttcagtgattaattcaggaaagcctttgctgagctgaaatccaaaataggaagaacccaccttccacatgttcaagaagcttgtgatcccagggatgacactgcccttttcctctgaaggaaagaagtttcccctgaccataatgccaaagctacaaacacttacatacctccataattttgcactgaact

SEQ ID NO: 599 - DNA, 366 bp, Homo sapiens
  misc_feature (1)...(366): n = A,T,C or G
gagcttacagtccagcggaggagccaaagaagtaaaaagagatctgcaaaatgaaagtatcacaagagaggtcaactcaagatgctatttcccatcagaacagaagtcacccttgactaaaaccacaactttaaacttggcccaacatccagtgccttgtccccaggggtgcaaatatggactgganaggaccccaatttatctgccctgccctgaggtctgggctgggatatagcccaggtcncatctatcctgaggggccttccagatggacacatggacagccagttctggtcccctgacttactcctctgtagtgaaaacagactcagtaaacacaagctgaattaaactggccaattgttg

SEQ ID NO: 600 - DNA, 240 bp, Homo sapiens
  misc_feature (1)...(240): n = A,T,C or G
gtcttactgcctattagagcaaaggaagaggaaatctttggctaaccggtcagagaaaacaactggattaaacaagatactcttcatgactgtggttgcaaaaangcaacacaacttttaaaaatcttagtactaatttttaaaaatggcttttaatttgggggagactcgataacagaacccgaaaatctgatgaattgtatgaacattttgttcagaaaaataaacatatattaccag

SEQ ID NO: 601 - DNA, 411 bp, Homo sapiens
ttaattctcacagaaactcttggaggtagctgcaagagctgctagggacctcgattagagttattacatatggaccctcatgaatcagaggaagaacgaggcctggagtcatgaaggggcttaactgaagtcacaaggctcacggcaggaccagtatcaaaatagaccccaatgtgcggcaggctcatcagtggaagtgacttaccctgtctcagatgaggctttgtactgtggactttcgaggcacatgggagcctcggtgaccagggaccatgttgctattccttattgtgtaccatgccagaaggaaattttaaaatcctgaaatactctttttgatggctggaagaaaaatattgtaaattggtaatacagagaaaatctgctaatcttgtcaaggaattttggaca

SEQ ID NO: 602 - DNA, 233 bp, Homo sapiens
  misc_feature (1)...(233): n = A,T,C or G
gttcatgttgctgaggaggcagagggctgagttcttccatccatcgccttcaagtgtcaggcggcttccggttggacaagatggctaccccagngggcttgtttcctctctggtctctttttctgtctaagactcactccataccagcctgagcttgggaccattgttttgctcctctcatcctcctacccccagagctgacagatttagcaaataaaatttacaagattctg

SEQ ID NO: 603 - DNA, 256 bp, Homo sapiens
ttgtatcagctgaagagcgtagaagctgtgccatcccagccattatgagcatctctcatgcccagatcttcgtttctgaatttctctttccactagaagaaaccatgagagaaatggcgagcctgagatcctttattgcaccaaaagcaaggaagtatggaaggagagctgagggcttgccaggacattggccgacatggtctctcactggtcaaacttgggatggttggaacatcaataaagaatattaatgatc

SEQ ID NO: 604 - DNA, 290 bp, Homo sapiens
aaggctgcatttctcaggcataagctcttgccagccattcacggtgattacgggaaggttaagcattgttgggactcacaaaacagctgtgttaagcattactacctctgaacgcttcaggaggaaagccacattctcctgtggaaggaaatagttgcaggtgatacctgctcccttcaccttctgctgtgagtggaagctccctgaagctctcaccagaagcagatgctggcaccatgcttcttgtacagcttgaggaaccatgagttaaataaacctcttttctttat

SEQ ID NO: 605 - DNA, 404 bp, Homo sapiens
  misc_feature (1)...(404): n = A,T,C or G
gctgctggtctgcaagtccagggaccatacttggagtagcaagcccccagggaaggacagactttaataagaagaggatcccctatgaaaattccaacttgagctcctttgttcattcagacattcatacaaataccaactgtgggccaaacactgaagatttccagtgcctatcccagaaatctgcactcctgttcctgccaaactcctgctctgcgtcatcaggtaattcccagcaaaaggcaaagtgtctccatgagtcacttcgtcccaacgcttaaatggngttggcttcttagctatgacagggacatcacagagcacctggttgaggctgtcactctatgcaataaccagctttcggccaaatgaaagacagcaccaaagtcatcaccaactgactc

SEQ ID NO: 606 - DNA, 402 bp, Homo sapiens
  misc_feature (1)...(402): n = A,T,C or G
atgaggaaattgaaatccaaagatattgatgacagaactgctaagtgatagagtcagcacaatgcctggatggaaattcacttccagaaccacatcttcaccacaaacattgctgtcagggctctccaggttaataacctttgctggtggggttctccanaatcagctgccaaaacagagtctgagtttcaaggtacttattagggatcaagccctgtggaagacacaggggaagctgaactgtgagggcagcccacagaagcctcccctgccctgcagggagctctggagtgaatactgttctgtccaccagagctgggccccagtgggcaaacaagaccaggcctttgcacccccacctcactcaacatcaagctgtgtgggttgtcctaagaaggggtc

SEQ ID NO: 607 - DNA, 401 bp, Homo sapiens
  misc_feature (1)...(401): n = A,T,C or G
gcaaaaccatcaacggatgctgacatcagcgagcaaaagtgtgatgaagaacggcgatttgcatcgtttcaaagtatctctccatgagatacttactaatttcaaaggggacaatggccaggtgaagcctggcagatgtcacttacactgagtgatccatgttgccatctccagggtgacacggngtgcctgtgacatgaagcgccaaggggaacccaatgtcatttctggggttcttcctgccccaaacagtccatttggttaaactcacnagagtgtgtgcttgtcgatgtagctgattctgtatgggtggggatttggaccaccccttcactactcaaagtggggtcttgtacaccagcagcagggttacctccttaaccccgagcttgtaagaaagc

SEQ ID NO: 608 - DNA, 242 bp, Homo sapiens
  misc_feature (1)...(242): n = A,T,C or G
ctgagatttacacggaacaaggaggtttggctatcgttacatgagagaacgttacccaaggacaaagaagtttcacagacttcccctggacccttgttggtgcccagatgtctgcggttccctgtcacttaaatataaaagacaaggcaaagctcgcataattctaagatggttctttaggacattggnctgcttcttcttggtttcctggctccccaaaataaagtcgctttccttcctcc

SEQ ID NO: 609 - DNA, 284 bp, Homo sapiens
agccgggctgattgtgtggctgcagagaaccctggtgctgaaaccctcaggacccctgggaggagagatggctgccactccaaagaacaagagccagagggggatttgagctggaacctacaaagccctcagaaggcattcgatgcctcactggaatgcccatcatttcacatgtccccagtccccacttatccccctccactcctatgacactgctggcccagcatggcgtgctacatacaggtgggaatctgtccatatcaataatccaaaccatcttttcc

SEQ ID NO: 610 - DNA, 157 bp, Homo sapiens
  misc_feature (1)...(157): n = A,T,C or G
cttagaagccttctgcttgaaaggacgctcacagcccttnttgatgtnatccagctcttatccacgaatccttcagcttgaccatgggnaatgcggactgtccccctttcgtagtggcnccagtgagacactattnttttaaaaataaaaaagagca

SEQ ID NO: 611 - DNA, 345 bp, Homo sapiens
  misc_feature (1)...(345): n = A,T,C or G
gcattcatgcngcctcacttgctgggaaatgagttcacacatttggagtttccaaggagagtacagagaaaggagcttggaaagaanatgctctacagggactttaatatgacaggctgggcatacaaaaccattgaggatgaggacttgaagttcccccttatatatggagaaggcaagaaggcccgggtaatggcaactattggagtgaccaggggacttggggaccatgacctgaaggtgcatgactccaacatctacattaaaccattcctgtcttcagcttcagaagtaccgcatgangtttttgtttatattttgngcaataaaaacattttcagcggt

SEQ ID NO: 612 - DNA, 429 bp, Homo sapiens
aaggtgactacttggaacgttgacttgagaatttagaagccgaatcaatgctccacggagaagcatgctgggattgatttgtgatgtctgccacgaatataagattggccatttggggcatgaatgctattcatggattggatctcctaagagcccgaatttctgagaaaccactgaagacctgaccccagcgcttaattatttctcctttccaagcatctctcatggaaggcatcttggatgaaaagacctttggcagcgtgggttttgcaggttgctggagagccagtgggattgcatcttttgcagaggacaggtccttaagggcaaaatcgcttaagagtcaaaatggccttgaaaattccttgggaagccgtcatgttggagccaaccactatttctcaataatttcagcacaagccagttttt

SEQ ID NO: 613 - DNA, 418 bp, Homo sapiens
  misc_feature (1)...(418): n = A,T,C or G
cacactacaagggtctcacagaaaacacttgatggaatcttactagactaactgtatatattcctgagcacactccaagacctgggagaggcagaaagaaagaagaaatgcaagtctacaatatgagatacaaagtttgaatttactgggaaagcaaagagaacacatccgaacaaaataagaagaagaaatggtgtgagtattgttgcattgcgaatggaatggagaacaatgaaatgagggctagaagccaaaccgagggtgaagatggtcaaaatgaggaagataatttatctttaatcaaaaatataataatcaccagaataataataaccataagaggtcaggaacagaagaagggtgaaaacagagtcaacctcaaangcaaacctagtaccacagaaccagggatggacaa

SEQ ID NO: 614 - DNA, 362 bp, Homo sapiens
  misc_feature (1)...(362): n = A,T,C or G
tttttcaaagacaaagatgaaataaagacattacaaaacatatagaagctgcaaaaatgtatcaccagaagaccagcattaaaagaaatgttaaagttcttcaggcagaagaaaaatgaaaccagatagaaaaacgtatctacacaaagaagaagagcatcggatttgtagtcactccaatgcttcctcatcaggaacctagaaagctgctaagaatccatctcacccagcatcaaattccacagccctaatgnatccagatatactcagaaatctacaagtcatgtcaacttctatgtctttcacttgccccaaactctgtgccaggtaccatgggagatgaaataaacatttcaaacatc

SEQ ID NO: 615 - DNA, 195 bp, Homo sapiens
cctactcacaagaagatggcaaagatgaagacttttatgatgatccacttccacttaatgaacagctgaagccccttcaccttctgccatgagtggaagcagcctgaggacctcaccaaaggcagattctggtgccatgctccttgtccaatctgcagaactatgagccaaataaaccatttttctttataaatt

SEQ ID NO: 616 - DNA, 170 bp, Homo sapiens
gagctgaacactgccccgagaatgcaacagaacttcagctctgtcccagggtcgtcagccacagctccaagtttcttagcatcagctttttctgaacaaaatagtgcatcctgctggaatcactactgtaaactgagtataaaggaaaataaaccctctttttcttatcc

SEQ ID NO: 617 - DNA, 98 bp, Homo sapiens
  misc_feature (1)...(98): n = A,T,C or G
atgcagcantaagatgcnatcttggaagcncaagacggacctctctntcgngagacatnaaacctgccagcaccttgatcttggactttcagcctcca

SEQ ID NO: 618 - DNA, 270 bp, Homo sapiens
gaaaatctctcacaaagaagtcatctcctagccactgtgatatttgccacatgggatttgagatttcagatgaagtccctatgccccgtgctggctggggagtgtggactatgagcatgagagagagctgccttctctgggaacaagaactgttggctcatcccatagggtctggtctggggtctggcacagcgctttcctcatagtgatgttcaagaaatgtttgctaaatgaataaatgagaagatggatacagacttattaaaatgc

SEQ ID NO: 619 - DNA, 418 bp, Homo sapiens
gttgttcccatattttccataagagagacatgtgtcggcttaaaagaaatgaaactacaatggtgtgagggaggaatctcgtgattgttagcgtatattttctgcattctacctgaaattgtcaacgaagtgtaggacccaggtcagtgcctgtctcatagtaggtacctaactaactacttgaaagaatgaacatcactatgaggaaagtacaccatagtgaccattttacagatgaggaaatggaggcacagagaatgagatgttgtaatgtgcacagttggagagaccactttctggcactcggatatgcaatataattttgaaaaattaaactacatgctcgaggaaggattcaacattttccggagaaccccagcattttccctcagaagactaaaattagatcctgttttaa

SEQ ID NO: 620 - DNA, 423 bp, Homo sapiens
cccttggtacctgcctctttggaaggcacctccggtcacatcaggagcatggatggggccccacctgcatacacatggagatggactcatcctccagctactttggataccgtggctcccatttttctactttctctgaaggattgaagccaccttgcccagaagtcaccgggagttatgcctcctccctaaggatggcccacagccagtgcctcatcggagcaagaggtacagaagccctgctccctcatctgaagatggggcaggctccgcagtgcaatccatgcacccgagctcccatggcatcagactgacattgctggaagccacagtcttcctcagcttctccttccctgtcctgcttccctcactcccttatggttttctcctgagggcactcccttaataaatcacttgcgtcaa

SEQ ID NO: 621 - DNA, 205 bp, Homo sapiens
gtttttcctccaagtcttgactgagactgagtctacatgacaccaaaacacccaaacgaaaaagaaaaattcacttgaaccacttagatgtttcttcaccaaatccagatgtttggcagtgcagataatacttctggataatgagtgactccccctacaatcaacactttcatcacactgctttaattaaaaaaatagttcccat

SEQ ID NO: 622 - DNA, 418 bp, Homo sapiens
  misc_feature (1)...(418): n = A,T,C or G
aaagaaaaacctatggaaagatcctgtgctggaagaaagcatgaagtaattcaaatgactaaaaggtcttaaacatctttgccatcatttataatgcagacttcatgctgagaagagcactcgacactgccaccgaagttctgtttctggtgttgttttgtcaattatgctgatgccacgggaccatggaacagtgccactatttccaagagcaacagcaaatcgaaaaatcttcatgcaatggttgttctagaaaagtctattacattggtttatgctttaaatatagttaccaccagagtagtaattttccaatctatcctttaaaagttcaagtgtattattgcattttttaagttgnaaaaagaatggatggtncacatatccttaacatagnatataaaagcactactcaata

SEQ ID NO: 623 - DNA, 156 bp, Homo sapiens
aaacaatatctgctcttggagtcactgccaccaagggaataactttacctggaatatggactgggagctcaagccaaaagcatggacaagggagtcccagattacaggatactattatgacttttgcataaatataaactcctattagataaattg

SEQ ID NO: 624 - DNA, 423 bp, Homo sapiens
gcgtgaaagacgctgaacaaatccctgtcagctgcacaggtgtctttgtaacacattgccagttagcgtgacaatgcacgggaagcagctatgctccaggttgtgctccagctgctcagcattgaccctgccccatgccctctgaagaagcagctttgccgaaagtggagggccagcaaagaaggaaactgaaagcaggtgtccaggtgatgaaattggcacagaacaccaaaggatggagctgagattcatgcctgggctgcctccccacaatcccctcacgttgaatccaaccctgacttttgtgtcccaccgaggaaagaagaaagccacccaccccagtgaccatggcctctaactgctctctctgcctgtggaaagccagtggattgggctaggatacaaatgccctccatcgatttt

SEQ ID NO: 625 - DNA, 263 bp, Homo sapiens
gttaacacacactaaagggcaatgccattaaaggagaagaggaactttggaaactgctgtctgaaaggaaagcaaagcactcttcattaacagctagtgggctcctaatttctgcccatgaaggcatgttcatactgacagagcaccccctcaaggggaagaaccatccgcgctaattcttgttgtcctcttctgagctagtgtgctcattgttcatacaaactagtgtgtcaacattaaaacaaaaagggagttgaatcaat

SEQ ID NO: 626 - DNA, 411 bp, Homo sapiens
  misc_feature (1)...(411): n = A,T,C or G
taatacacaatattggcaacaatgcaacaaaatggacacactctactctccagcgggagtttcagaaatatgccataatggaacaagataactaaaagaagaaaactacctcaaggttaaaaaaacgaaaagaagagaaagaaaaaaggaaagaagcagaaggaagaactctgctgcagtactggaagcaggcagattatttaaattacggtggtgccatggaacaagagaaggcagatgaagagcgacacccttcaagttaacacaggaacaattaacaatagaatccttaagatgcaaaactccttgctgtttaccagcaccagaanagaggaagaagnggntctgggggaattgcgtgccantctgcggcaggttggctggaaaancanccctggttggagctttgga

SEQ ID NO: 627 - DNA, 121 bp, Homo sapiens
aattgtatatttccacatatgctggacaataggcagaaagtggagacccaaagaacttgtgatatgacggacatgagaagcttcagttggcctcaaatgtcaaataatatccttcctgaat

SEQ ID NO: 628 - DNA, 196 bp, Homo sapiens
gattagaggccttctaaaaagagttgcttcggagctcactgtctttcagccatgggagaatatagcaggaaggaagcagtcttcaagcaaagaaaagtgctcgtgaaagaagagctgaaccctgctagaatattgatcttggactttccagcctccagaactgtgagaaaataaatttatgttgtttaaaccatgt

SEQ ID NO: 629 - DNA, 161 bp, Homo sapiens
gagcagatactcagctgagaaaagtacgaaaacagatctgcaaggacatgcagtggaatgtgagtggtttggctgggaagctcacaatgaagaacaaattgcaccacagaatggctggaaaagttaattaaagcaacctcaccaataactcagccagtaac

SEQ ID NO: 630 - DNA, 444 bp, Homo sapiens
  misc_feature (1)...(444): n = A,T,C or G
cnaactgagattttacacaatgttgtcaaactgtgctggaagatgacctttcccaagaatggggatgattcattcttctgggaggaaaagtcctattggcaaaggattcttcttcccttgtatacatgtgtcactgaagatcagaacctgcactctacgcaacaaagcaacagatgaatttttacagtgctataagttttaagcatataggaaagaaagtggaacagtggncagagtcttgggtttggcctcagcaaaatggtgcttaanagtgacagccttggtgntaacagataattttcaaaactcacaaaaccatcaaatnangaatccnttgngtgccatttctcatccattggcaatggatcaggcaactgttagctattctaagtgaaattttgtgaaatttcaaattcagtgcttttttaaccaatattaaaagtg

SEQ ID NO: 631 - DNA, 421 bp, Homo sapiens
  misc_feature (1)...(421): n = A,T,C or G
gtggggtcttncatgaganacnctaaagcctcctgnnananctnccanaattgtcaggattctncaagatgatgnggcnganggtatttgaanacantgagttnggagggggcacacagctggagaaagctcaaatgtcctgatgccaanaagttcattcatggaccatccaccctnctgtccacacacccagtggacggagacagctgccctctgctaaggatttccgcatgggggagagcctggctgctgtcgagcagtccccttcctcccacctcttccaactaggctcttgagaatgtcagctaccacacagccacagctaccacacacctgcttgaagaggagacaccaggacacccatcaaaagccagaactggcatctnccctgtgggaagttcttncttgtttaacctcaatc

SEQ ID NO: 632 - DNA, 246 bp, Homo sapiens
aaactgaggctctcccctagactgtgagcagcaaaaggaaaacaaccccacctgccttgattcagatgttctcctatcaccagcacagtgcccagcacgtgggaggtattcaactgctgctaactgttgaacaaaccagccgggtcatctgcaaaatgactgtcctggactcctcaaaaatgtcaactcatgggagaaaaaaaggctggggaatcattcttgattaaagcacaccaaagagacatg

SEQ ID NO: 633 - DNA, 165 bp, Homo sapiens
attggactactagagtgaagcaaattgccaaattgtggagaaaagcaagctcacaagaaagagcaccatatgtggtattttaagaaactcctatcttttaaatatttaaatacagtgcttgaaccttatttgtattaggttaataaaaaaacaaatttccatttc

SEQ ID NO: 634 - DNA, 323 bp, Homo sapiens
  misc_feature (1)...(323): n = A,T,C or G
aatgtttacacttggagtccagagctgccctgttaagaagctcaactaccctgaggtcaccatgatgtcaggaagccaaactcgatggaaaggccattaagtgggtactgcacttgacagcccagtgtcattcccagcaaacagtcaacaccaacagtgggagagttgtcttgaatgtctacaccagtctaatcttcagaggacagcagctccgtgacatctgactccaactgcttgagagatcttatgccagaaatacccagccaagctcttcccacattcctagccccaaagaattnttagcaaaataaaacagttgtttt

SEQ ID NO: 635 - DNA, 105 bp, Homo sapiens
  misc_feature (1)...(105): n = A,T,C or G
aattcctgtctngagcatnngcttnnaccttgtgtaccnagtcactctgttgctgctgtcggtacagatcgcttccccaaggaaataaattacatttcattctct

SEQ ID NO: 636 - DNA, 414 bp, Homo sapiens
gaatgaagataaaatcaagacatcttcagatgaaggaaaactaagacaatttgtcatcaacagaccgactctaaaagaatgttcttccaacataaatgaaatgaattaagaaggaaattgtaacattaagaatgaagagataactatgaaaagagccaaaaaatggatcactaaaacaaactatctttcttcttctgagttttctaaattatattgagacagttcaagaaaaattacattgtctgatgtggttctcaatgtaagtagaggaaatatttaagcaacaatgatataaagaagagtgggtaaagggacctatatccagataagtcttctactctttacttgaagtgggaaaatgcccctagcagagtgtgatcaaaatataaatcagattatatcactttcttgatc

SEQ ID NO: 637 - DNA, 386 bp, Homo sapiens
  misc_feature (1)...(386): n = A,T,C or G
aaataagtatggatggagagaggggattatagcagagcgaatagtgttgaagtcttggtggggacattccgatttaataactttggagacagaggatgtgttccagctcacagactttcaggaataatactggaaattgacatctaatcagcattttatgcactataattgtgtaaacttttaggcctgctgtacaataatccttccctgctgtgtggtgagcactttggggccctctggatgctagatgtgatatgaatgggaagcattattattatttatgccttataatatgtcaactctatgtcctctgccacaacngacacttatttcaaatgtgcagtaacagcccccaagtgatgtattggcaaaatatttttgaaacc

SEQ ID NO: 638 - DNA, 185 bp, Homo sapiens
gacatcaagggctccagacattgagaaattttccctttaagttgcgatgggaatccagaaaacgccatatggacccctctatgctgtgaaatacttcagtactcaggagaagtcacgttctggttgctgcaagcgtgtgataccctgtcattaaaataagaaatagattgttatcctctgccaag

SEQ ID NO: 639 - DNA, 93 bp, Homo sapiens
  misc_feature (1)...(93): n = A,T,C or G
cananctgttnnntcaaatctgatnnnggcncactgaccctgaaaaatggctgagctaaaataaaagctgtgtttataacgctgaaacgaaat

SEQ ID NO: 640 - DNA, 267 bp, Homo sapiens
  misc_feature (1)...(267): n = A,T,C or G
gcctcacttgtcctctcagctatcaagataactgttgggtatgaaaactgaactctgtcttagagggtttctttttccagaagatgcatgtttggaattctgcaagaactcctgatcactttaaaatcccaatgcctttattttcaagatgtacagtttctgtcttttatcaaatagaggagcaaaatctattcttccaaaaaaaggaaaaatgcacaatatccaaataaattttccccagctgcttnctggatattggaattagat

SEQ ID NO: 641 - DNA, 324 bp, Homo sapiens
  misc_feature (1)...(324): n = A,T,C or G
gcccacatagaaaagctgtcattggcctccgggtcaggcaagagatgggaggtgttcagagcagcaaaccctacaagatgttggaggccattcacaagcaagcgcctgcttggaaaataacgtgggataagaacaatgaaataatttgatgaggaaagtgttgtgctacattgaatactcacgtcacaaaatgtgcttctacattatgtaacttacatggtcaaatgactggtacattttattcctgtgctaatttgtcaattctgttccaagnggaaagagtctaacatgacttttcaaaaacaaaacaagacaaaacaaaac

SEQ ID NO: 642 - DNA, 311 bp, Homo sapiens
agacgaggggcctcgctatcttgtccaggcgcgtctcaaactcctggcctcaagccatcctgctctccagcctcccaagtagctggaattacagaaattgaagaatcagttccagagagatctcctggagggcctaggatcacagagcaaagcagaaaccacagctgtctcggaggacgaaactccagctcttcacccagagatagtcgtgggctggtggcttcagggcccactagggcctttgttatgagttttctcttcccagcggtccttttattgcataatcaataaaccactgacagaaataaaag

SEQ ID NO: 643 - DNA, 398 bp, Homo sapiens
gataccttgactccaactcagtgactacaaagaactgcaaacaggtgtgaaaacaagcaataggtcatctctggcattacctgggaattcaagttcagccctgcattctccctctgggcaattctggtagagaccatgaggcaacccctgggaggagcagtagccataacaggatccccccacagcaaccccagggctaagaccagtgggtgcaaaacaccttctttatcaggtgacgccatcgcctcaactcctgcagtggtcaatatggtcaatattaagttcacaaacatgggaacttcctgacatcatcacagaaggaatgaaaatgcagttggggtggctggtacattttaaaataaggctggttctcctgggagggaaaaggggtttttttt

SEQ ID NO: 644 - DNA, 281 bp, Homo sapiens
atcatttactccagggaagaccagctgccatgtcacgtgtagtcttatgcagatgactacatgataaggaactacagcctcctgccaacagccatttacaggtaatagaagggagccagaagcagttcttcattgctacaccagacccagaataagggtagactcttgtgatcatcctccctttctcaagagctggagaccagatcctactgaagagtccaggctctaccatgtatgaacaagggtaactttggaaaaattattaaaactttccaggcctc

SEQ ID NO: 645 - DNA, 364 bp, Homo sapiens
gtttgcagagaaccagcagcctgacaaccagccatctctcctcttgataccagtgttcaagcaggctgaaggtcagaatcttggcagtttgtttcctagaatatacaacatcagactgtgcttcctaaaagtccaggagagttcttctacgagaagattggaacttgatagagcagaagatcagctgaacgctggaagactctccagtgtgaaatgtttatttctaggatcttctgttcaaccttggagccttcagagtcctatgtatagtcttaaactgctgatctaaaaatggtgctctgtttcagcaggtaattaatgatgttacacattttaataaaatttttcagctagatcgctacct

SEQ ID NO: 646 - DNA, 403 bp, Homo sapiens
gacacacagccctcctgaagaaataactcacaatcttcctgtgcccggctattgccagacccttggctgataggagaatggatgttagctgactgcaaccttggcgttatcagtactgcctgtggccctctccagcacacagcacaggcgccgtcctataacatccccagcaagccctcatttctttgcagtggctcctcccttgctgacctgccccttgcttcggctcctcccttgctgacctgccccttgcttcggctcctcccttgctgacctgccccttgcttcggctcctcccttgctgacctgccccttgcttcggctcctcccttgctgacctgcccgttgcttctgtgctatgcacatttcctactttctctaataaatctgcctttctttaccg

SEQ ID NO: 647 - DNA, 428 bp, Homo sapiens
gttgctatgacagccaggaatttgcgaaccaaaccagacctggagaagaagtctctccttggcccaaagagtttgcagttccaagtggttctgctcatggttcctgttgtcttctttgacacctgccagatggaagaacctctaaacctgggatttggaaatgtcccaacagaaaggctatttccaagctggctgaagcttggaaataaattcgacggaatttaggtgtgatagaaggaacttcttggcaagaaaagctggaaaatattacaataggtcccagagagaacctcattatcttctcgaaaaaatttctatatttgtttagtgttctgtggtttgctaagcacattcacataaattatctaattggatcttcacatccgcctggtgaaggagtaaagataggtttcataatatttgaccaa

SEQ ID NO: 648 - DNA, 26 bp, Homo sapiens
tgagtggaagcagcctgaggacctca

SEQ ID NO: 649 - DNA, 161 bp, Homo sapiens
ccctgctacatcctccttcaagatagaaagaagaaaccctaaacacagagaatgcaagaagcagaagagggccccatctttacagcgatcagctagcagagtcaaaaagcctgtgtggagttttcaacaaagcagaggtgcaattttccttggaaaaaaaa

SEQ ID NO: 650 - DNA, 295 bp, Homo sapiens
gcacatctggataaaggcagaaacaaagtaacaagggaggaagtcccagtaaaccaatcttttttctcccaaacacatattttggggctgacatcatagccacatggcacaaactacagatggaaaagtatctgaactcaaatccggaaacttaacctttatcagatgaagacaagaaagacttcagcaggcaaactcacacctgttgggctgaggagctagaaatcaacaaccaaataccaacattactgctctggaaataacttctgttagaacaataaagtaagatgagggc

SEQ ID NO: 651 - DNA, 409 bp, Homo sapiens
  misc_feature (1)...(409): n = A,T,C or G
atctctcttaccgggggatgcaccaaagcccagctgttcagtgtcaatggctgccagctcccaactacatcccacacagacgggagccacctcaatgtctgcgagatttcctgtccctccttttcaatcccatcaaggcaccctctaccaatgactgatggatacagggatacaaaagcccagacacctatcttccaagaggaaaaaactctgtggtggtgccatttatgttccagagcaactgcgggatcaagctgagggtggactccagctgaaaccacatgcaacagactgaatgcttgtgccctcccaaaattaatatgttgaagctctaatcccaatgtgatgatggtattagggaggtaattgggtcataaangnggatcccctgttaatgggattgcactta

SEQ ID NO: 652 - DNA, 309 bp, Homo sapiens
  misc_feature (1)...(309): n = A,T,C or G
gctcatagatggaaggaacttgccttgagtccccagtaagacactggattttggacctttgaatcaacgatggaaagtttnctgaggcctccccagaagcagaaaccgctatgcttcccttacagcctgcagagccgtaaatgagagaaaatgcaactggaaaactggcttccattctaagatatttaagcaaganaaataatcatagtctacataatcacagaatagcttggaagaagatgctactgagtatgttacacaggagcttgtgatcaaatgtaaataaacaggtaacatggacttgggaaa

SEQ ID NO: 653 - DNA, 434 bp, Homo sapiens
atgtctcaaggaagtggatgccaggaatgatgaatcactgaagcctgttgggggatccacactcgaggcacagatcatacaatctttgagagtaaaaggatggatcaagaccacaggaaagaagggatgaagctgtggagagtgaggatgaggaacattgcagatgactggaggccagctccctgaccttcccctactgccactgctgcaggccctggtcaggggaagtaaaactgacactagctgtttatcatgctttaagaccagaaagtaaaatgaaaaccattaccacctctcaggatgcaagaaggcacaagaaaggactaaaccagttgaagatgttatctcaatggaagaaggaatcctaattaaattgaagtcttaacaaaaagacggtctatttcacaagactgatagagacatatacttgatga

SEQ ID NO: 654 - DNA, 407 bp, Homo sapiens
  misc_feature (1)...(407): n = A,T,C or G
caccangataactgatccaagtcacaagcaaacactcaacggaggatgagcatccatccagccacctgtctttgcctgctttggaggtgacgcctggcttntcccagcagcgctgatggatctgatggtgatttcataccaggttgcagcctttagtcccgtcacagtgcctggggaattggccaccgtggtttcaatgactgtgtccccgtcttcanccgtgaggaggtaactggtggcacccggcactgtagcccattctacagngatactgttgctgagttttgaatatgcctgatcaatagtgggtatttcaggagctgaaagaggttttagagttgtacattaaccaanatacctacgaggatgacttctttcatcattntactcttcaagctaaatctata

SEQ ID NO: 655 - DNA, 234 bp, Homo sapiens
  misc_feature (1)...(234): n = A,T,C or G
gtccngggagactttcatcttcaaactttgagagagagctgagaagcctcggaaccgtcgcccccgtgcccccaacccacctcccggatccgcgaaacctacaaaactggatcaccagccgtctcacgccactactgcctgtgccaagaatcccaaactctactgatttcaagcctgtcttttttccaaagaaaaaagtcttatctaaccaataaacaagctgctttccctagc

SEQ ID NO: 656 - DNA, 422 bp, Homo sapiens
  misc_feature (1)...(422): n = A,T,C or G
cacnacctgcattaagtnacnaactgaggttgatcccaggagaaaacattctactcctcagcatgggtcttgcctgattcatttaccaactatgacactctcacccagaggcataccaagaaaggaacttgagaaaaccattccagttaaagcaagttgacccggcacagtccaaaatccgtgctatgcagcacagtccaaaatccgtgctatgcagcacagtccaaaatccgtgctacccagcacagtccaaaatccgtgcagagctcgtggcacagaggaaaatggacataaggtagcggtaacaggctggcgactgtggcttttacacattgcttcacacaaccctgtccaggagctttacacactcactaaacaaacagaagacaccatccaattcactggagccccgttggataaat

SEQ ID NO: 657 - DNA, 333 bp, Homo sapiens
acgctgtgcttggtcctacctaaaatacaaaatcaagaccacccaggccctgctctaaggaagtcactctctagaaagggacagagacatgctatcaggaagaaaactgaatatccttacattgtgaggtcagatgtatggctttcattctgaatgcagtaacttcaaatgtagacacgtgaacagaaagctttgtaacagaaaaacagcattgtttcgttagatgactatagatagtatttcataaaatacaagaaaaacactcaaaattagctccaaaaaatgtatgaaaggtgatactctgatatttaataaaactgaacctctcacaac

SEQ ID NO: 658 - DNA, 411 bp, Homo sapiens
  misc_feature (1)...(411): n = A,T,C or G
ggacaattgcctttgaatgaagaatgacagagctctggtcttcgctgacccttgcaactcctgcagcgtaatccatggcaactcgttactacggcaaccaaggaacatgcaccagaccaggataaaaccgtgaaatctgatgtcatattttcataagacataattgcaaatgatattctaaagcagatttgttaaacgtgtgatctaaattataagttaagttggaagtgattatgaaaccttcattgggactaanaattaagggtctgtgttcatgcactcagtgattgngttcatgcactcagtgattttattgagcacctactatgtgtggcacacggagatgaataagacatagnttctcatgnctattcttcccctcagcccccctcacctcttgaacagacataa

SEQ ID NO: 659 - DNA, 398 bp, Homo sapiens
tcagaaaaaaagtaaccaactggcccaaacagcatgaaagaacaccaggcaaaaaatagaagaaatataccgtatcatcaaaaggtgcgtctgagttgaagtctctgttgaaaaactgcttattagcctgaagaatctagcagggtcatcagaagacttttcacacccagttggttcagctgtctcagatgattgtactgccaagaagctcctgtgattcccagcttggtcccctttgtagaaggccacgtcttcttaacctaggaataaatgaaactgaacagatgcctatacccccttgtgatatttttctgtgacacttaacatactttgaaaagaccagggaaatgttcctatcaaagaataacagatatatccacctgaagcgtatcggcata

SEQ ID NO: 660 - DNA, 211 bp, Homo sapiens
  misc_feature (1)...(211): n = A,T,C or G
caaactactgctttgtccatgaacaccttgtcaacttcaaagattcacttctgttggaaataaacagcatgagcagaaggctgccaagttacagaaaatttgaagattcttgaagattctttgatgacaacaagcttggcagggtggcttcttgatgttgaagtgctgaaaaggcngattttaangggtttnnaatggaaaagggggggag

SEQ ID NO: 661 - DNA, 86 bp, Homo sapiens
  misc_feature (1)...(86): n = A,T,C or G
ataanaaaaccaggtntgcggggaaattgagacttgaactcangnctggcggactgcnaagntgacacctgtctgctacaagcaag

SEQ ID NO: 662 - DNA, 320 bp, Homo sapiens
  misc_feature (1)...(320): n = A,T,C or G
ccattgtctgggagttttggaaccactgactgactcttcgagcaccaggcttttcccttggtcctcagcactgggtggggagccctacatcccagaagtcttgggaaacagggtggagcggaatcgcctatcacagccaaacaagactctccaggaggaaatacagcagagacctgctcagggcttagcaaacagtgacaaaggtgaggtgaagccagtctggacgcacaccagttcgggatgatctgaggaatgtcaggcagtccctatatcctcagatgtgtncccatccacctggcacatgtctggaacttcccatt

SEQ ID NO: 663 - DNA, 386 bp, Homo sapiens
gacacacacacgaaggttccatctatgaggaatggaccctttccaaacactgaatctgctgatgtcttgatcttggacttcccagccttcagaactggaaacagccatgacaaaatagaggatgaaaatgttcaaaagaaggggataactgatgagggacaaaagaattccactggaaatggcaactacagctggaagagtgaagatctgattaaggaagggctggaccatcagcgttcctggcattgctttcaccccaacaggacttgacctccagtatctcttttctattcatcctgtaccagctgctgtctatatgggctgaaattgtgtctggttttgctcatcatcttatagcatatagcaggagtgtaataaacaattgc

SEQ ID NO: 664 - DNA, 249 bp, Homo sapiens
gccttaggttccagagccttaccaggatgagagggctgatggtgacagtggcagtgaccggaagctgggagcccttcccaaagcccctggagggaactcaccactagcacgaaccgccaaggccctgggtgccagcctagtgcccgccctaggagactgacatggaaggcttctggcttcagtcaaatgccatctcactcatttgcctctcctttctttcttttccagaattaaagctcataggatgat

SEQ ID NO: 665 - DNA, 278 bp, Homo sapiens
  misc_feature (1)...(278): n = A,T,C or G
cttatatactttgatgaatcaagctgtcatttanagagcctcgtgggaaggactgagagaggtgtctagccaacagccactgggcaactgaatcctaccaacanccatgtaaatgggctgggaagcaaatctttctcaggcttgagatgaccacagccccggtcggcaccttgattatagnctgtgaagtccctgaaagcagaaccagcntaagtcagcccagattcccaacccacagaaactctgaggtaataaatgtttaaagccactaaaaaacc

SEQ ID NO: 666 - DNA, 620 bp, Homo sapiens
  misc_feature (1)...(620): n = A,T,C or G
gactccactgaaatgcgctgactgcaagagtctatngagggatgggnaatgtganccatgagggacacnagncactctggatggcgngcttgcccggntnccntgaacncttanngganggcnggntgtggttcnanaggatgtgggctttnccccttacaaanggatagaagtgggagtttgcctggncccccgacccagcanggacttttacaaggggaccntgaatgcttggganaaactaatggcgaaaccctgggncctcacttaagggctttttttgnttgcccnaaaccaacacttgatctnccttatttgggagccaagggagaanganccccggggggcccttgaatttttgcaanggtgggcttaaacaaaaaacgtgggncccaaaacccaacctgttgccccaaggcctgggaaatggccaaatggggcttcgaatctttggggttaaattaaaaaaccctnttgttttntttgggggttnaaaaacaaattttttttntggcctttaaaaccccttttggtttnaacaaaantttttattttgggccanttttaaanccccccaaaaaaaaaacctngggnntttttggggggaaaaaaacctttgg

SEQ ID NO: 667 - DNA, 412 bp, Homo sapiens
  misc_feature (1)...(412): n = A,T,C or G
aagcagtgtcacgagcaaatcgcagaccagaagagacacttgtgggaaacatctagtgactcagtgattgcagagatagcaaggaggaggaatgatgggtcaggcttcctccagtcccccatcagaatccatgggacaagcaaaggattccataaaggcagctgagagccactgggggcttcctgttcaaaagctggaaaaagttaatcagacccagccagaagacactagtggccagcaaaaacctcatcctgggggagcggttaaagacagggcttctaagcaggagccccgtctgtagctgtgagtcagcatcaccatgtccaaaacaaagtccacgagtgggccaaaccccacaaaaacccnnggacttggggttttntgganantttanccccccggggaaggtttt

SEQ ID NO: 668 - DNA, 257 bp, Homo sapiens
  misc_feature (1)...(257): n = A,T,C or G
cgtcgaactgagatcacaagaccctggttccagagcggtcctgctttacacccgaggggaaaagggaatggtccntncagaaagggccanaagaatctggagangaaggccnatcacctttggcccggtgggtgnccattctttattggacctaagccttaaaaatagaccaggttcccctgggtctttgggtcttcatttttgaagactcctgtcatggtaaaacctttggattaaaataaatggtatcatgcatt

SEQ ID NO: 669 - DNA, 497 bp, Homo sapiens
  misc_feature (1)...(497): n = A,T,C or G
ttcgtccactgagtnantncgcancaagaacagcaggcaaaaggaaaggcaccaagtgtaaaggaagaatatttgaagcagaacagaaaataatttctgagcaaaaagggctatgtgatgatgcttcattcagctggtgatccattacacctgttaagaggccaaagagaactgtagatctctgaggtccatgggggcaggggcaagggaataagatgaagggaacactagaataaatgaagtgccttaacagctgaaaaggctgatggatgtgctttgcacctcagaagacggaactcccagcaggagaataaagagtgcaacaagagcagagcctgctagaacccacacagtnagggaactgatcctctaataacctctnctttcagaactttataatgngctattaaaaaccccttgtttgngggntanaaaaccngggctttaccccccttaaanggggttttttggcctttggccnaaatccccaattgggg

SEQ ID NO: 670 - DNA, 257 bp, Homo sapiens
gaactgagagacgagacctatgttacccaggctgtatgtgaattcctggactcaagcaatcctcccatctcagcctcgtccctggaactcccctccaggtgccccaggacctgagagagaggtggagtgaagggggagagaaaacaaagcccagggactcgcccccaaaaaacacaatcaagaagatgctcccagcttttcaatttcagacactgagctcctcgcaagattttgttggaaggaaagcttctacagtt

SEQ ID NO: 671 - DNA, 254 bp, Homo sapiens
  misc_feature (1)...(254): n = A,T,C or G
agacnanncctnnggctnnnnggtggcttcggattccangagggcgcccaanaacggattaactgncagcttcctggagcacaagcttgntattagcgcctatatccttggtcaagcaaaagtggctctncaccaacttaatggtctttttaccaccccattttctggacgaacgtaatcacaagtaagaaccaagaagtgtgcaagtccccgaatcccaagtgcttcataaataaaagaatcccagaagcttc

SEQ ID NO: 672 - DNA, 306 bp, Homo sapiens
  misc_feature (1)...(306): n = A,T,C or G
ctccactttccagcctcccttgaccttcagttggagccatttggctggagtatgaccaatggagtatatatagaggtgctgctggactgggacacatgaccagatgcaccatctcttttcccttctggtggcaccacagaggcccgcaccattaccagaagcataaccatgaagggaagcaccagaaagcctgaatcggttgcttggaagggagaaactnccagggggcccaaaataacccagaaaaatcttaccttggattttgcttaaaataagaaagtaaaatcttttattggtgttaaatcc

SEQ ID NO: 673 - DNA, 125 bp, Homo sapiens
gtagactgagatgatagtaacacgaaaggaaaattcctaaccagtgcgcaagaaagaagaaaatcaaccatgcataacactgattttagataatatcttatccataaaccaacagagaaaatgcc

SEQ ID NO: 674 - DNA, 288 bp, Homo sapiens
agaactgagacaagagtaaaaaaatagtggtacacgagatttggatatcaaaaaggttctgcagttaagctgatcagttccagcaagatggaagatcaacctcaccattcatgaaaagaaaacaatggctttaagtcaccaccaccaccaccatgaagacaaagccaaggacagaaaaggggtgaccggccttcgctcaggagtttgtcaaaagagttaaaagttggtcattttgttttattgcctattttatttctccccgactttaagaatgggtcctaagcttgc

SEQ ID NO: 675 - DNA, 343 bp, Homo sapiens
  misc_feature (1)...(343): n = A,T,C or G
agtctnattgatgtgcagcaaagcacaccanactccgtncttggntggnattagnttgacacncaccccanaccaggtattcnggcttcaaccnagggtctggacattnccaccntanggaaccaggaataaacaagtaaggaaaaaacttcactttcgaacccttntaatggacttcccattttcccaaanttggccaaatcaagcacttncncnnntttaccaaaggcccccttnccccggacaagaattaatntttaaaaaaacntcttgatccccaaaatgtttcgggngaggacaaangtttggaagtaacaaataaaaaattnccaggtctccttgc

SEQ ID NO: 676 - DNA, 94 bp, Homo sapiens
tagtcctgcattagtagactgagtgccattaaagatccaaagtcatgactgactccaagtatttcacaacccaataaaaaagggaaaatatttg

SEQ ID NO: 677 - DNA, 456 bp, Homo sapiens
  misc_feature (1)...(456): n = A,T,C or G
gactctggggagctcctgcattaagtcagagggngagatgaagaaactggggctctgaatggcatattaacgcgtgcagctccagacagcgaggaagtgatggcaactctatccgaactcaaatctgccagacctataccagtaggtgcctgtgtgcagttggggactcacctctgccattgctggcatgagctagctgtcttgaactgaaaacagacactcaaagatgggctgtgggatcccagagaggtggcagaatggtcaaagctatgaagccaacagctgctgccaagaagaaagtcctgagccctgagtgattgtaatttaaaaaacttaatgctgggagtgggtgtttattttggaggagtgggctgcttatttttggnttggggacttgttcattcatcttttctcacggcgcctactgctgccctggnccgaagttaaagctcaatg

SEQ ID NO: 678 - DNA, 494 bp, Homo sapiens
  misc_feature (1)...(494): n = A,T,C or G
agaactgaggaaaaacttgaccaaaggaagccacccacactgataattgccagcctgggagaaatgactgtagaaggcacatccaggccccactcccagacccagtgcccaggctccaagcatctctccatactggaacagcacggcagctccaaatctggaactcataccccgatctgtaacccgtacctcagacctacatcttcaactgatttcagcccaactgtgaggctaattctgctttctttctttggatagaggcttaaaaataaatataaagaagatgatggacacgaacgtagattaatactcttgtaatacctttaaggagtaactactttaatagctttaggtaataactactgcaaacactgggatgaattggggtttatctgctttttaggtgaggggaaaancccccnnccaaaataaccccncctggggttttaaggttaanaattttaaaantttnttttnaaagggttggaaaaggg

SEQ ID NO: 679 - DNA, 246 bp, Homo sapiens
gcgactgaggtttacaaggtgactacgctgttctagtccatcttgaagaatacaaaatgaatcaaagagcatcgcttctgccctcaaggagcttcctatgtggaaaggaagatgtggtacataaaggatgtggatttctgccttggtgtcctgctggtgaattctctccagttataaaacattttgttaccttcattcgctcttaattaaaaagggaaaagaaactcctagggctctgacaacagg

SEQ ID NO: 680 - DNA, 447 bp, Homo sapiens
  misc_feature (1)...(447): n = A,T,C or G
gcctgataagtacaactggtgctgctgggagacgcttacactatagtctgaacttctacagagccttttcctactgtaaacctcactcaaaaatgacagccttccatttcacaagaatcagagtcttgctatgttgcccacgtggtatcaactccnggcctcaagtgatcttcctgcctcagcttaccaaagtgttgggattacagatgtgagccacagtgcccagtctgtgtgtgtttttataattggaagcacatgacatcttttacacaatatgcaaatgcatattgaggaaggagggagagcaaatatgtctaaaagtaatcacaataagtcttgacccattaactgtcagatcaaaatccacaccaattttagattcagaagaacactttgtcttttttaaaaactntttntaaaacaccttcccccgntttttttaaaaaa

SEQ ID NO: 681 - DNA, 299 bp, Homo sapiens
agaactgaggacggtgggtgactggctcccctggcccttccttgctctcagcaagagctcctgccactgccacagtggaaaaggcctgaatttgggaaatgaagacgtcagagactcgcaacttcttctgaaagcccagccaactttcctacaagcatgactgcagacgtggaagagaaaaggcagatggcctgggttcaaagcccagcttaaaaacacatattctagctttgtgaccttggtcattttggttttacttccctcatctgtaaaacggggagaataaaggtctctaactt

SEQ ID NO: 682 - DNA, 500 bp, Homo sapiens
  misc_feature (1)...(500): n = A,T,C or G
gctccccaatgaactntatnctcttcattggacntgtatgggattatnganaggaacttgcntacagagcggnccactagagctcagccagatcatcctacagtgaagctctcaggaaacaagtaccatctacaaggtgcctaaggaagcacagaggagagccacctccaaaatggataccctctccaanggtttgtagtgaaagaggcacagctcttggcctggagttggtgggggctgcgataagtgcaagatacttggtgacaggaatcgcgagcatactcttgtgttgtacggattctcagggtcggccctgcagaggaaagaactcngtcaccgcgaggtcctgccaacatgcccaaagtncccggatatgtgtgcngggngttaaacctaaancccccccccccttttaattttccnaaaaccccccaaaaaggnttggggccccttccttttacccccttaaangggggggggangntgnttttttgaataat

SEQ ID NO: 683 - DNA, 360 bp, Homo sapiens
  misc_feature (1)...(360): n = A,T,C or G
ggaggaggtgaacgcatgttttggcattacatctgggcttccagccctcatcaaggggaaggggcttctgactcctgccagcaaagggacttagttgctttcaagtgggattttattcacctggacagtcatgcaaccaaatcacaagcagagaggaggcttccccaacccagagtccccacacgtgacccttaatataatgtgtattgatgacaacctgaagcagccttgacttcagtcctcagganaacaatatgcaactctttataacaactggagtttcccagatttccaaagttcaaatgaagtgaaagacaatttctggtgagcatagacattaaaaatgagaaaacaaatttc

SEQ ID NO: 684 - DNA, 469 bp, Homo sapiens
  misc_feature (1)...(469): n = A,T,C or G
ggatgaggtaggaagagcggtggattctactcctctttcatcatttgaccttcaacaagtcaacctccactctctgggccaactcagcaaaccaagcccgaggacccgaccacctccaagatccacttcagctccaagatgctacagctctatttctccaagagccttcctccagcatggactgattctccaggcccctttgtgtgtatactccccacaaagggacactcacaaattgcactccaacaagaatgagattatcctctaaagtactgcgttaaagtgaggatcagggagaaatgaaataactctgagagacacttcctcctatacagaagcaagcaagaaactgggaaagggaaagtccttccgaacagaaggggctggagaaaactcataacacattagccttcactcttaaagctttcagncaccaaagaaatgcttgattccgaaatcggtttttgtt

SEQ ID NO: 685 - DNA, 310 bp, Homo sapiens
  misc_feature (1)...(310): n = A,T,C or G
taactgatggtgangtntntnctaccagtttacttaangctgtatgtacgctgcttgaaccctaaaagctgggaaatgagccaaggccacggtgctcagctgaggagcaggtgtccctgagaacccaaacatcctagagtgtatctgggaacataccaaggaaaagagtctcatcacatgcggcagccaaagagccacaaaatcagcttaaaagcagcttanaggcgtgtggtgggtggatctctagagttctcctgatgctgcccgaaaatgtcctgtttgtgaatcctaataaactcatctactcctc

SEQ ID NO: 686 - DNA, 97 bp, Homo sapiens
caccagaactgcagatggatttccgacggatgaatcaccttcagcaaccccagcaagttctcattaaatgtttaccctaaagtaagattttatgatc

SEQ ID NO: 687 - DNA, 344 bp, Homo sapiens
  misc_feature (1)...(344): n = A,T,C or G
agcaatctcccatctttaacagatgaagcttaacacaagagcagcacaaaaaccgtgaaaaagaaggtggtaaaaaatccatcttctcagactaccttgctgatgaaaaaaatagctctgtgacacagttcaagccgatgaggtatgagcagaanagttctctgactgtctggaaagnctgatttcctgatacagacaccactcttttccccatgcctgaattctanatgtgttgatagatactggggcagccatccagggaccatgaggggnagaccaagagaattccagaaaggntgactttgttgtaacttcaacctctgaaccacttgcctactcttaac

SEQ ID NO: 688 - DNA, 193 bp, Homo sapiens
tcgattcaaatgttcttcacagttgtcacacccacaggatcacaaactcaactgaatctcctttaggtcaagtttctgtggaagaaactcagaaaatgggacctggagaaatactcttctcatctaagttgtcaaaacacctatggtcatttttcagtaactgataatccaaaagtaaaatattaaagtccag

SEQ ID NO: 689 - DNA, 306 bp, Homo sapiens
  misc_feature (1)...(306): n = A,T,C or G
acagtcctgcatagtcctnctnagcctaataatcctggtgaccaactatacccagcagggaggacaaagctcttaacacgaaagagtgaggagaatctctccattacccttttacatattcagggaagagagaatatcgcagtcgctggaaacgaagggcacagcatcgtgttgctgtatggccacggttggccacagaaaggcagaaagtcatcaactgtatggaaaccagacaactctgacgatttctatgcaaggtgactacaccttactcgttctccaagtattaaagatcttttcatcctt

SEQ ID NO: 690 - DNA, 489 bp, Homo sapiens
  misc_feature (1)...(489): n = A,T,C or G
attacagatgttctgcaagacaggctgagaaacagaatcattccaatcactcctgctgtatcctgaggggagactctccgcctgttcaacacagggacacgctgcctcccgtggcaaggtgactgtcttgctgctgactcgggcaaaaagaccatgagaatgaattcaccaaccagggttcccttcccncgtaaatactgtgagaaaatggatgtcagtctccagctgaccgcagagaaatcacggccaggtgttggcacttacagagaagaatgaatacagaactgctttaatcatacactcaggaaactccccaattgtatcaatgactctatataaggaaacgaggnttgggacctccaaacnaactctntgggnggccccaagcaaaacaattcaccccaacggnggccctatggacaaganaaactcctgcagttattctattttctnagctccctgctcctcgttttcctcaccttagcaaga

SEQ ID NO: 691 - DNA, 244 bp, Homo sapiens
ccctcttccaactggaggcttatcctgtggctgggaacatttcctgcctggctgcgaggagtgagactaagaaaccatacctcaggctgaggagagaggccgggtttgatatgtgtgccctggggaagaaaaggagaaaatgtgatactctctcatttaaagcatccacatcaaaaattgaagaactggattacattgctgtttacttagtcaagttacaataaacttgatttccttttgggtc

SEQ ID NO: 692 - DNA, 237 bp, Homo sapiens
agaactgagttaagaaaatacctgggaggaggagccaagatggccgaataggaacagctccggtctacagctcccagcagatgggtatcactatcttgcccagcctggccttcaactctggaattcaagtgattctcctgtctcagcctcccaagtagttgggactgcaggttgcacaagtacacctggctctgatttattattgaagactccaaataaagaacttgcagaaactct

SEQ ID NO: 693 - DNA, 147 bp, Homo sapiens
gtatccctgaccattcaggaaagagacatcaatgacccgaaacaatacaaggaacacaagatcttcatgaatcaaatgatacttggaatgaatacaccaataagaatttattgccaaaaagttactttattaaaacaaattttaaat

SEQ ID NO: 694 - DNA, 169 bp, Homo sapiens
  misc_feature (1)...(169): n = A,T,C or G
cgacagagttgaaaccagatgggatatcacacaattacaaacccacgagttttcctgttactttaaggacaaaggaagaggacatttgaaaagacagtagtttnagaagcccttgaaaatacctccatcaagaagctctggatctgcaaggggtgggggcttttgcatt

SEQ ID NO: 695 - DNA, 429 bp, Homo sapiens
  misc_feature (1)...(429): n = A,T,C or G
cgataatatgctgtatgagcctcctgctctgctgcccattacctgcgtcacctccacaagctactgaacctcaaggaacccatctcctcatcaggaaaaaaaataagctttatcagggtctgaactctgtaggtcttcaccacggctcaggaggatgaggagcagtgacaggccaaactacgagaaaagacagagggaatcaaactcaacactgtgtctaaacctcctccaccactgttgaggggatcctggcatcagatggggaacagctctaaatcaaaataacctcactactgtgcttttctgtaaaaccaggtaaagatcaaacaagcatgagttgaaaggntaaaaaaaaaaaaaaagggccggggnggccatttangttgggattnaacnnggtnaaanttnttaaaaagggggggccccccc

SEQ ID NO: 696 - DNA, 185 bp, Homo sapiens
gctgaaacatgactatgatggtgacctagctttggccatgcaggagatgacagtggcaagagaaggaaaatctgggtttcagatcgacatcatggagcagagctgcgccaacaacctgaaatgcatgctcacagtggcctgttaagagggacagaaatataaacattaatgaatgaaaccactat

SEQ ID NO: 697 - DNA, 292 bp, Homo sapiens
tgtaagaaatgaacagacaaagattaaaagactgcagggttgaaggaagctcatggaaaaatgtgcagagatgcataaaggaaggagaaaagtgcagcaaagccacatagaaaaatggccagaagggtcactcttagccaccaccacacagagaaatgaactaaaatgaaaactcacaactcaggaatatggaataataagcaatcagaaacataaatataagcagttttatctattcattatttttattctactattagaataaattcatgactaaataaaattattcagc

SEQ ID NO: 698 - DNA, 472 bp, Homo sapiens
  misc_feature (1)...(472): n = A,T,C or G
gtcctgcattggccaactgaggattcttccaaacaagaggccctagtctgtgactgtcaagccttgccatcaacactcctctttggtggagagctccctgttggccctgaggcaggagtcttctgagatcttgacatatgctgggcttgatccaggcctcagtacaggtgaggaaacggaggcctgtagaagtgaagtgacttgctaaggggcagggctgaggtctgaggcctggtctgagtccaaaacccgggcaggctctgagagctccaccctgctgccatcttacgtccaggcagggcctgcaagggacagcaatgatgcaaagacaaacaaaggaagagcaaccccagccctgccacaaaaccagctgggaccnccggccaaaaggagttattcgacctntccagcctcagttnttcacttgtntatgaaaccaacangagtaaatatagaatgggagttgaaacgc

SEQ ID NO: 699 - DNA, 203 bp, Homo sapiens
agaactgagatctgaactttaatactcttcatgcttacagaccccggctggcctctgtccctcaccattctgtgtctagaaaaagcagttgagaacccatattcttcaagaacccttccccattaccaaacaccatattattatatttaatctacccttcagttcttttgtagccaaattaaaatgtattactctgaagaaag

SEQ ID NO: 700 - DNA, 372 bp, Homo sapiens
  misc_feature (1)...(372): n = A,T,C or G
atgcgggagagaatatttgaccttagatttgtccgcctgcatctttctcctgacgccaacctcagttcctcctctgactgcctctctccatctgtattgcaaaacaccaaactctctgccaaagaacacatccaggtgtggccatgtgactgagctctactcagtgagaactgttgtggcacgttctggacgatgcctcagtgaggcgatgcgcatcttttgccttccctttgtctcctgggaagtgattttgaggatagaaggtatgcgctgaggatgatgggacagaatcatgaagcctccatccaagacttcgctccttcctatggatttcttttatgngggaaaataaataattggggggggtggaaa

SEQ ID NO: 701 - DNA, 396 bp, Homo sapiens
  misc_feature (1)...(396): n = A,T,C or G
gactctggcgagctcctgcattacctcncatctgtgactctgaggggagaaagggaatgacatccaggacaagaacaaagaatagaagaggaaaggtgctgctacaagttggaaagaagcagacagaggtccctgctgattctccaaatatgtgtctaatctgtttactgagttccatagcacttggagccatccatgcnaaaatctgtagaagagcattccaggaagagggaagagcaaatgcaaagacgggcgtgagagcttggtgcatacagccatgggccaaataaagtttccttggaatagcaaaaaaaaaaaaaaanggcggggggggnnngnccatttnggtttnancnnnnccnnnntttttttnagggggggggggccccccccccc

SEQ ID NO: 702 - DNA, 495 bp, Homo sapiens
  misc_feature (1)...(495): n = A,T,C or G
gtggtgttcccactgntgaagagcangcgacnggnaaggaccatnaancaactnaccagctaggagtgatgtactatgatgggctggggaccactctagacgctgagaaaggggtggactatatgaagaaaattcttgattctccatgtcccaaagcaagacacttaaaatttgcagctgcttacaacctcggaagagcttattatgaaggaaaaggngttaaacnatcaaatgaggaagctgaaagactgtggcttatcgcagcanacaatggaaatcccaaagctagtgtgaaggctcaaagtatgctcgggctgtattactcaaccaaggagcccaaaggggtaaaaaaaggcnttttactgggcnttccgaagcatgtggcaatggaaatctggagtcccagggtgcacttgggctcatgtacttgtatggacaaggcatccggcangatacggaagctgccctgcagtgcttaagagaagcagcagaacg

SEQ ID NO: 703 - DNA, 369 bp, Homo sapiens
aactgaggaacccttgggtgcccagctgctgtccattctctacacttatcccacctgatggaaggctgttaagaaaaacatcactgcaatgcctaataaacagacatgggtcccagacccaataagagtgaaaccatccccctatttaaatgaaattatggctgatgagaaagacaaattaatttctctgtccctagtattacacaaaactttggatgctgccattgttacaattttattttccccaggagctcagagtcccaccttcattctttttgtttaatgcttaagcttgcctgtccacctatggaagactagaatgagcaaagaccatgtattcaatgatctgtaaatctaacaggaaacaat

SEQ ID NO: 704 - DNA, 153 bp, Homo sapiens
gtgtgatggatggagcattggagcaaccacaagggaaaataatacagacatgaagaaaacagtaaagatgctgtccctgacatcattgagcagtcagcaactgcccactaccaaacttattgtcatgtgaaaaataaaaacctccaattcttt

SEQ ID NO: 705 - DNA, 131 bp, Homo sapiens
  misc_feature (1)...(131): n = A,T,C or G
atccaggaggtaancaatcaactaagagccaggcacctttttaagtccagtaagaagaaacatttttacaacctgctgtctctgaagtctgctatctgagattcctctccacaataaaacttggtctccac

SEQ ID NO: 706 - DNA, 323 bp, Homo sapiens
atcatccacaaactacaagtaacatgtagttacaacatggggctcagaatgtaccaagatcatcctatgtctacagaaaggagtaaaacacaaagactaaacagagttacctatttcttgttagcctgagaaaaattcttttcagatgtctttcattacctcagaaatggaggcaaatgctttaagaagggtcatataatactttgaaaggctattgccatggtgtggttattaagctcttgggaaatgatgggcttctcttcaagtataaggaacaattgtgccccctaagagtcatcttgaattggaatgaaataaactgg

SEQ ID NO: 707 - DNA, 273 bp, Homo sapiens
  misc_feature (1)...(273): n = A,T,C or G
gacctgcattaaggtcgactgagtttaagattccccagatgccttggataatttgttttggaaaacatatattgaagataccnagagccacagtatgacagaagactaggtcccagaatcacaactggaaggaaagtcatgcactaatgaagaaaacaattcttaaggcttatatgagctgaaaacaaacttctgtcatgttgctgcctttatccatttttaaaagatgtttgtcatcagtggtgctactctaataaaatacatcatgagcac

SEQ ID NO: 708 - DNA, 390 bp, Homo sapiens
  misc_feature (1)...(390): n = A,T,C or G
gcctgacaaaataagtggctgtgctcggaaagcccaagtgacaatgaagtccaggtaacctctaggaattgcaggttccctcttggagctgaggacagtctccagtctccagccagcaagaagccagggccctcggtcctactgctgcaaggaaaggaattttgcctgtgcccggagtcagagtggaagccagttcttctccagtgaatgtgaacgcagcctggccagctccttgatggcaggcgtgagaccctaagtgggggactgagtgtacctggacacctgatccataaaaactgtgagaaaaatctgtcttgntttaaagncncntccnttgggggcaatttgcagcattaaataattaagtacaagtacatgtcacccaaggtc

SEQ ID NO: 709 - DNA, 430 bp, Homo sapiens
  misc_feature (1)...(430): n = A,T,C or G
aagtctcaacaattaaaagaaaattagaagccaagtgcagtggctcacacctgtaattccagaactttgggaggccaaggtcctgcataccactgaaactactgatgtcagctttctgaaggaccccactgagaagactcactaaagaaagcagtttccatgtcctgatgattttgtctcccttaccctgaccaatcaatggccctaatttttggtcattccattttcttgccctccatgatacccttaaagaccctgcccagacctcgttggggaaatggatttgagggtctccccccacctctttgctgggaagcttatgatcattaaactatttctctgntgcnnnnnnnnnnnnnnnnnnnnaaaaggggcgggggggccanttnngttngnnttnaancgggngnntttttttaaaagggggggg

SEQ ID NO: 710 - DNA, 473 bp, Homo sapiens
  misc_feature (1)...(473): n = A,T,C or G
gccataaggttcttaagagcagagaatattgtttctgtaatgattctcggcaaaagcactcagttacaggattcataccacatgatagattctaaatcttgggaacagaatcaagaatccagaaatggatggaaccacacgtatatgaacaactgattttcaacaaagataaaaaggaaaagctcacctatgaaagagtgcttctctccagccagacaataggagtagggaagagaccgatgctgaatgactcacgaaaatactgcaggaaatgacaggaccgtccccagaagtcccttccactggcttttgccgggctgnttcattaaaanctggcagnaaggatgaatcncaagaaaaaggcttattgtaacctcacatcataaattttataaaactgcttcataaaaaataaccttggggtccaggaactccactagaaaaatgtncaacctgtcttcaaattggggaac

SEQ ID NO: 711 - DNA, 464 bp, Homo sapiens
  misc_feature (1)...(464): n = A,T,C or G
ttcctggaatagcacctgatacacaaaaggcatccagccaatgtttgctgaacaaagaaatgaaggctgcctgcatttactaggagaaggatgacaaccacatgggacaaaaaaagaagtttttttggtgnanccnagnccggggggtccgnantnggggggtnttnggcntannnnnnttaaaaaatgaanccgcggactntcgcggnactgcnctgngcagggnaaaaaacagtcnttccgganccncccanccnggggttggaaacgtgctccgttacattccaactagatggggtttctctctgttgtccaggctggagngcaatgatttgaaaattggnnncctttaactcttgagctcaagcaatcctcctgcctcagcctcctgagtattntganagtataggtgtgtgccaccacatccggctccactttttgttttggaagattcccctcaacat

SEQ ID NO: 712 - DNA, 316 bp, Homo sapiens
atgagcataaatgagagttaatgcatctaaaactgaacacaaacacctgggggaggaactgtgaaggaccctaacaccaccaccaccctcaccacccctgttgtcccgcatatccacagccaccatggttgccttggccagcagaagcccaaaactgagggcccttgtgaaaccagctgttggaatatataataaaggagaagttcattggatgctaactcaaacaggaccaatgaaatagcaacatgttttcactatcgggtacgtgtcttggtagactcacggtaaatgtttaataaatatttgatgaaagaat

SEQ ID NO: 713 - DNA, 513 bp, Homo sapiens
  misc_feature (1)...(513): n = A,T,C or G
agactctggggagctcctgcattaagtcatgaactgagaaatgaagactggagaagcaatgggacacacaggcaatggggctaggcattggttgtccccattcattcatgcagcaaatggccattgcgtccccttcctgtgctaaacctgtgcaggtgctgccggacttcctggacataagaccctgtccgggcactcaccaccatcatgcttgaggccctgccctggtgtcagtctttccacgatgctgactggcagtgtgtcgggacagtccccaggcaggcctcccggatacctgtctagattatctctgtggtggatgtagcctttgccccagcattcaccagtgacaagaaaaaaaagnacttttanttnttccaaggctntacctgggtggtggnggatgctgctgtcactagaaggctactgtaaataaagcctgcttaatctccttaacccggatggcttgtgtcaaccgggttggagccgccaggaaacagcccatgctttaaa

SEQ ID NO: 714 - DNA, 323 bp, Homo sapiens
  misc_feature (1)...(323): n = A,T,C or G
agacgtctggggagcacctgcattaatgtcgaanctgagcatccntcncaactgngatctgtgatttgggcacggcttggtggaggcagctcatttctgcttcacgtggcatcagctgaggtggcttgcccagaggttgcagaactcgcgtccaggacagctcactcatgtggctggcaagttgatgcggtctgtcagctgggagctcagcagggtatttggctgggggtcttggttctcctccacatgggcttttccacgggttgcttgtgcttcctcatggcatggtggctaagtcccaacagtaaacgtcccaaaagaac

SEQ ID NO: 715 - DNA, 320 bp, Homo sapiens
  misc_feature (1)...(320): n = A,T,C or G
gaagtcaactgccatttttcgtgagctgtnaagctgacctatggaagagggtcccacatgggcagggaactggatgtcttttgccnacagccnagaaanggatggatcctttttactaccccaagaaatggagttgggagcagaatcttccccaagctgagcctttcagatgagaccacagaccatgcctggcaccttggattggcagccttcttgagaagacccttaaagccagaagacatccaactacacccattgcctcaagttgcttgaccccacaagatacccatgaagataataaatgttgtcttaagctactg

SEQ ID NO: 716 - DNA, 251 bp, Homo sapiens
  misc_feature (1)...(251): n = A,T,C or G
gctcactttcaaaaccgggggnggtcagcccatttggtcactggatgaagcaggatgcaggctgaatggagaggtggtggagttcgcagtctgtcccaggcactccctcacccagctatctgccaatacaccactttgatttatctattgtaaagctttttaaaagtgtcccttaaagtagcttaaggacaaatgtgaataaagcttcacagcaagtggagatgcagcctgaagaggcacgtcataagctc

SEQ ID NO: 717 - DNA, 93 bp, Homo sapiens
atctcccataaattcccaacatcaactatttaaccgtatcatctcatggttaaaaaaagaaaaaagaagaagatgatgatgaaagaaaagaag

SEQ ID NO: 718 - DNA, 470 bp, Homo sapiens
  misc_feature (1)...(470): n = A,T,C or G
tagtgtcataagaacggactcggttcttcctgcgtgaccacggatgcttctgtttgagaanangcatcccacggtgggacgtttanatcaagaaagctnntgannaagacatttgtnaaagggcaaccttgggtgantgggggaaattatttctttttnatcaaccccttctgcaatacaagctggaacctggcnccataggaagtttcgggacaattacgggaccatcctttttccttttctcttctttctttttttttttggtnggattggttttgganacaaaagtcttttgtttncccaaggctgggagtgcagntggcgcaaatccccgggnttactgnaaacctnccgccttccttggtttaaaggggaatttttcctggcttaaancctnnctgaagataacttgggaantttnanagggnnggngggaaaanccaaaaaaaccnngggnaaaattttttttg

SEQ ID NO: 719 - DNA, 417 bp, Homo sapiens
  misc_feature (1)...(417): n = A,T,C or G
gggagtaaacaacaccctcccagaagatgatacaggccaaatcccgcaacgagagggctgggtcggaacacacacaggcgcacctnccanaggcccccgacacttcatttaaggnaagaacggagcatcccacgaacgggaacaagnttgggaacctgggatttggcttcggtgacaccctaagcaaccggggtgaagaacgcttaagctggggaatcccgctggccttctgntcatcaaagcctgtcttttcaccggccaaccttnccaacccctaagcaaccccccgcttcccaggaaaaataaagtgccacccacgtcgcttcaatagcaccggcccaaaaaactcccactttagttcctggaaaaattaagtccccggcangggggcctttttttttttttaaagggtttttc

SEQ ID NO: 720 - DNA, 161 bp, Homo sapiens
  misc_feature (1)...(161): n = A,T,C or G
gtctttggacttagtctagaactatactactggctctcctggggtctccagcttgcctactgcagataacgggacttctcanactccattagtgcatgagacaattccttaaaataaatctgngtgnatgttattgnatcaataaaatatatatgtatcct

SEQ ID NO: 721 - DNA, 485 bp, Homo sapiens
  misc_feature (1)...(485): n = A,T,C or G
gaggcaggtctagaggcctgggagacatgctggacaattccgaaaccaattctggttacagaaggcgacatgtctttcatgtgggccattcaatgagaatgtgggggacccctggcagagatcaggaggccccaaagaggagatgacagagcagagcccaagagaagcatccagaggaaacgtttcggatgactcctcccttctccggccagccacttctgaaggagggtagcgcaggggcacagggtgagggctgacctgcctgtgagccccggccctgctactcactggctaccgttacctggacagatcaccacttcgctgagcctgagtcctcatttggaaaacaggggaaaaaatacttattttttaaaaanacatggntngggcattaaaatnaattnttgccanattctntanctntgtgaaagtcagcntatggaaggcnctggagagnttaacaataaaaaaataccttggccttt

SEQ ID NO: 722 - DNA, 290 bp, Homo sapiens
  misc_feature (1)...(290): n = A,T,C or G
ngatgcctccaagttgttggaaggaaagtatcngancatntacnagggaaaagggccacattgttgggcattncaagccacaanccctnaagcttgagggtcaagaagctnacaagccagcatttaaccactaaccccaccaaggtggaaaggggaagactttcgaaagccttcaaaacttgccccaagcttaaatggccaaggtggggaagcagaagatgaagttgtcccttgcttgaaaatttgcaagactcatgaagccaaaaataaaatgtaagtttgttttaagg

SEQ ID NO: 723 - DNA, 629 bp, Homo sapiens
  misc_feature (1)...(629): n = A,T,C or G
tttctgcnctccctccaccctcggngctctgccgnctncacccctnctttnattaaagccctgncctgnntggnncaaggncaggtgggcaccctttnaccccgagaaagaatntttnaatgggcaaaggggnatttttnnnccaccccccttngaccnaggaaaccccnaaaatgggccccaaaaaccagcaaccnagcctttacagggagacttttcaagaggaggaggaattttggccccaaaataaaaccacttggtggggaggtattttgggatccccgaagacaaaagaaaaccctttgcacaaagatccctcaccttgcaaaggacaccatttcgctaaagcccatcgggagggggcaagtcccagggcccgggaaaaaagcaaattttggacctttctccttgggccggaaacaccaaaaagccaaaagttcccnggggaaaaaagnaangttttaaggngnttaaaagaggcattttttnttnggactttnccacgganggggaaaaatacttttccaaagcccaaattnccggggcccgggcaccaaggaattttttttggntanggggtctttcaaggggaagcctnttggggcccagaaanccaaaaaaggtttggc

SEQ ID NO: 724 - DNA, 149 bp, Homo sapiens
  misc_feature (1)...(149): n = A,T,C or G
agaactgaggttgtactggtcagtggaccatngtggaccgctgggatnttgggcaggggtgccntgggatgangggcgggtgggaccttttatatnatggggaaagcactctcacttattaaagatcttggnaaatatttaaaaaattg

SEQ ID NO: 725 - DNA, 113 bp, Homo sapiens
tgttcctacctggctcaaggaaccctgcttctctaaagggggagcgctgcacccggattttggtcttttacgttgggcctcagctcactgtcagaataatctttctaaaacac

SEQ ID NO: 726 - DNA, 366 bp, Homo sapiens
  misc_feature (1)...(366): n = A,T,C or G
cccagaccggtgggaacccccntagtcctgcttatttnggcntgaggagaggtaggctnncgancttnncnnnaaaaaatgggttttttctnacattgggaaantctgacnccttctnagaaaataaagtggcttgtgttgnccaaacccctttaacccaagggaaaaagtccncgaaggancctctttgngnactcctaaagccttattggaccagggtaccttncttcnccccaagggagaanccttgtcttgttccaataagtggaagacaaggtgggaagaaatttttttggcgccctaccntttttttcccattttcaaaaaaagaaggctgggccatttgnttaccnttcttgtggatcg

SEQ ID NO: 727 - DNA, 167 bp, Homo sapiens
  misc_feature (1)...(167): n = A,T,C or G
gagaggtaggcttgngaggcttgctaatctttgaagaatgagacgaagttccctcccaaaattactactcccccactctggaagatgctcacaaagccaccagtctcaagaactatattcatcaccctttggatgggtttttttttttaaataaaaaactaaaaacc

SEQ ID NO: 728 - DNA, 213 bp, Homo sapiens
  misc_feature (1)...(213): n = A,T,C or G
gattcttaaagcgcaaaaagccccaatcatttctttgagaacaaggacgcagatcttacatcacgaacactnngnactnnttcatgggtgcagtaagaagatggaatcatgaaccaggaagtgggtcttcaacagacccacctctgcccacaccttgatcttggacttcctaagcctccattaacncngagaaataagcgtgttttttaaacc

SEQ ID NO: 729 - DNA, 451 bp, Homo sapiens
  misc_feature (1)...(451): n = A,T,C or G
aactgagacatcctgcacnnaagcttggccccttattacagagctngaatgcncaccggaaaaggagtccagtaaaaggnnngagcagcttcagggcccatggctacccccatgcaaaggaggtgaggccacagaaccgaactggggtctgttcgcctggcacagcaaaagtcaaacactaacattaggatggcagcgagaggaagtgaagcatttatttgcaagcaccaagcaaacagagttggacagttgatgcctaagatcccacctgcccggtggcttgcagaatttcaggatagtccagggatcaccgaaagagatcaccaaactttctctatgaagaaccaaatactaccaaccttccgtntttgccggccncgnggcttttgaacttaactggntaacttttcattaacgngaaagtagccncggnccatatgccaaaaaaaat

SEQ ID NO: 730 - DNA, 542 bp, Homo sapiens
  misc_feature (1)...(542): n = A,T,C or G
ggacctgtgccccnattctgaggttttttggtgntcagnggngngggctatcgcctttaaaataacctgggcctgggcagcaacatggngnantgaaaaaaaagcaggctttggaatggataaaactatacttgaatctctgctctatcaccttatcatgttatggcaagccagntacggaacctccatcatttgncagtgcctaactcagcttctcgcctgctggncangctctggaaagctgagtgaaaacagaaagcagccagaaagngctgtggggacaacttgcaataagtgtcacatgggcctnctcctctttttatgtgccccatgtccancctttttccttggtggccnctttccanaaaacttttggaaaccattgggccaaagttacctggaaattttcccttgggcctttnaaccttttgaccattttggtaaaaggtangaanatggatnaaaagccttttaagggnccaaagggcaggngggggcttcaanccccttgggcttgggggtaaatggggaaatcaattttg

SEQ ID NO: 731 - DNA, 267 bp, Homo sapiens
  misc_feature (1)...(267): n = A,T,C or G
tnacttccagaaaagagtgaccatttggcattgtccaaccattaagatgtgaagactgttttggagttcctggtacagtcaatgttgcttccctgtcctcttgcttccaatgcttggagccacaacagccatatgcaaacatgagtgacaggccaaaaattaatcatagagacatctgtcctgataccaccacgccagtgaatcaataccagcaacactgcaactctgcttattatgaaggaaaaataaagctctgttttataaagc

SEQ ID NO: 732 - DNA, 755 bp, Homo sapiens
  misc_feature (1)...(755): n = A,T,C or G
gggaaaaaaccttgggaagggccctttccggcccggggggtttttgggaaggggggnaaccaaaaaaaaccttttcctttttttttnggccnggggggggcccttttttttttttcccaaggntngggggggggggggaaaattnccggcnaacccccnggggntaaanttcnncggaaaaattaaaaaananccccttttttttttggtaaattggnaaaaagaccccccgggnnccccaacccccccaaanttggnggggggnaaataccnggggggccccccaanttttttggggnaaacccaaaaaagggnaaattggggggaaaatttttngggcgaacccggcccaaaagggggttnttcctttttnccaggggccaccggccctttttggnggggttgggggganagnaaagggggccttaatttttccccgggccttanttggaaacttggggggnaacaaaccaaanaacaaaatnccggcnttgcttctttgatggcnccgncctgttttccgggcttgtcanncgcaagggccgccccggctctttttnttaaaanngacctgtccggtgcctgaatgaactgcaggacgaggcagcgcggtatnntgntngcccacagcgtctgccactgtctcgacgtgtactgacaggaagggctggctnttttggtnaaagcgggcaggctctgcatntaacttgtttgcgnnaagatcatatggtgangaanacgggggtggatacctt

SEQ ID NO: 733 - DNA, 367 bp, Homo sapiens
  misc_feature (1)...(367): n = A,T,C or G
gggagtaaacaccctccaaagatgatcanccaaatccgcagcgagaggntggggtcggaacacacacaggcgcacctcccagaggcccccgacactncatnaaggnaagatcgnagcatcccacgacgggaacaagnttgggaacttggcatttgcctcgctgcacctagcagccgggtgaagacgcttanctggggatccgctgctctgtcatcaagcctgctttcaccgccacctccaacccctagcaacccccgctcccaggaaaaataaagtgccacccacgtcgctnaatagcaccgtccaaaaactccactttanttctgaaaaattaagcaccgaaggagcctttttctttttgaagggt

SEQ ID NO: 734 - DNA, 484 bp, Homo sapiens
  misc_feature (1)...(484): n = A,T,C or G
ctcccgatggacccgagattcagggatctttcccgggtaaacggtgggggcnggcngaaagaaatgcnatagagctaatttaagntctagatcatgatagcctgggatatgggtatgaactgntattggtcgggatttcctggaccatcatatggnaatgacagnttgntatgtaatggagatgactgcccagacctatgtaaaaatttaagtttctactaaaaatattcttcttgaagcttatgagactattttcaaggaaataacttcctaaagaaataggcccctggtgaaacaccagggaataaaggaaataaattgagaaaaatccnccaggcttatttttattgntnccnttncccgggggttnaaaggaatttttaattaaaanggttcacanaaaagcccttttcatttattttaaaagattggacatattttgnccttttacttatagctagagcacncatactgggaaaggtta

SEQ ID NO: 735 - DNA, 192 bp, Homo sapiens
  misc_feature (1)...(192): n = A,T,C or G
cgacctgcattaagtagcactgagagctgagatccaccctgcattcagtctgaagtgacagaagcaagagactctgtctncaagaaaaaagaaagaaaaggggtatttaagctccagtcatctggccctttcttccatctcatattttgggnggcttctgtcacataataaatatgnattcattttctcctg

SEQ ID NO: 736 - DNA, 271 bp, Homo sapiens
atcccagaagccttgaaaacaaagagcccacaattgcagtaaaaagcagcagcccggcagccaccagagagggcagagtcccgcaacctcccaccactttgaaggagctggagctccttcaaagcctcattcaaaagaaattgtcattattttacctatctggtgtttcccgggaaccctacttgcaaggctggctttatgtgattaaagttcatcagtgtaaaaaaaccttttccctagtatgtttgtcaaaaacaattaaaggtaattg

SEQ ID NO: 737 - DNA, 210 bp, Homo sapiens
  misc_feature (1)...(210): n = A,T,C or G
gactgaggtgccgtgtnttggagtagtgtgtcctgtacctgtcacctttaacaaacaattattgagcacctactgggtgccagatactccaccaggctctgagaggacagaaatgcataagacacaattcctgctctcaaggaggcctttcaaaaagaagagagtagaaaaaattcacacatttcccccattccaaaatgacatctgaag

SEQ ID NO: 738 - DNA, 389 bp, Homo sapiens
agcctgcattaagcaaactgaggagttcgcgccctctgttggtgttgtaatcaccgcctatgtggagatcctacatctctgggtcctgtcagtgtttgtcaccagcctctgacgtgcatttataatcatctgctggacatttctacctgggaaatttgaattcttggtattttgcataatgtgttccaagtagagctaattgtaagtccttccaaagagaatgctcatcatcttttttttgtttactcaaaaagtcccaccatacaataagctcttcaagaaagatttgtacttatgaccctgaatgggttagtgtgtttatgctttgtttagaggcattgaattttgtgcattcaaaatacctgaaataataccatcctggaccggtt

SEQ ID NO: 739 - DNA, 214 bp, Homo sapiens
agaactgagaggatggaataaaaaccgcaactcacaacttttcaagaggccaccagtcattagacactggcatccgttagaactgctgcaagcttaaatcaaacagtcacctggaaggaacaggtctctggagactcccctctagctctgagatctgtatttcacagttatttgaggcactgttaaaagcagagaataaaatagttgaaaattc

SEQ ID NO: 740 - DNA, 216 bp, Homo sapiens
  misc_feature (1)...(216): n = A,T,C or G
aagagaaacttcatcagcgtgtgtcccggagtgaggacgtttggagcaggagcactcactgccacctgtgatgggcatgaagctagcatccatgaccagagttttgtgctgttgcaccattacaaaatgagcacaggagggtggacgggagctctctgnacccttcacttaattttgctgnggaacctaaaactgttttaaaaataaagtcaattg

SEQ ID NO: 741 - DNA, 473 bp, Homo sapiens
  misc_feature (1)...(473): n = A,T,C or G
caagagaaaccaaggnngaagagaccaagaaagaaatgagaaagagatgaaagggtgaagngacagaaccttctgagctctcctttcctgctaaatcccaggcacatgctccagattccttaggcaaaggaagaaatgaaaggagagaaagagaccaaaattttaaactctattaaaaaggactgcctgatatttatacccaaaagaaccaatgatgccatgggatctaactaagatattaacagatatgaaaagagattcaacagagtagaggagcttcagatatatacctgtcgtgggttggctctgngcttcccccaaatctcatgtcaaaatggaatncccaccccttgaaggangggcctggggggaggngattgaatacgggancnacttgnccttgcttttntagcgatggagttctnagaaanctggttgnttgaaagngcgnggacttcccctttctggctttt

SEQ ID NO: 742 - DNA, 764 bp, Homo sapiens
  misc_feature (1)...(764): n = A,T,C or G
ctcgcggttgaggacaaacttttcgcgggcntttcangtggggggaatcgaacgggaatccgaataaaagcttttggaatggaagcccggccacccattggggaatccgggcccatttggaaccaaagaatgggaatttggcaacgccaagggtttcttcccgggcccgctttggggggttggggaagaagggcttatttccgggcttatttgaacttggggccaccaaccaaagaacaaaatccgggcttggcttcttggaatgcccggcccgtgttcccgggctggtcaagccgccaaggggggccgccccgggttcttttttggtcaaaagaacccgaacccttggtcccgggttgccccttggaaatggaaacttgcaagggacgaaggccaagccgccgggcttattccgtngggcttggcccaacgaacggggccggttccctttgcgccaagcnttgttgcntcggaacggtttgtcacttgaaancccggggaaanggggaacttggcnttgcntttttggggcccaaaaangggcccngggggcaaaggnaatcttnccctggncnaatttttaaaccctttgggtttcccttggcccggangaaaaaaggnaattcccaattccaattggggnttgaaaggccaaaatgggcngggggggggnttgggaattaccnccctttggaattcccnggggtttaaccctgggcccccattttcgnaacccaaccccaaagccgnaaaaaacaatttgg

SEQ ID NO: 743 - DNA, 571 bp, Homo sapiens
  misc_feature (1)...(571): n = A,T,C or G
agaactgagcattttccagantattcaangcttcangatgggcctgggatctcactnaccgtttgcccatacttgncgctctattggcccacaagactccaaaagacagtgatgataaaggaagactaggagtgaaatctaatctctgtaacattcctagatatcaggaaggtcagaaagcagaagttctaggagcctggacatttgccaccaatgcctctatgtagcaatcctccttgataaatgcccataaacagaaatcaggagataatgggttcacggaaatgagagactagactgcattttgcttccagcccaagcctaacaaaggcagggaaaaaaggcttcatttaaatgagaaacagagtcctggaatcaaaaagctctttaataacataacactaaatttaagtcagaagtgggtaattttacttttgcataatgattggactcatagacatatctagtagaaggttgaataatttgaggttatacctgggatgagtaaaaggtttaaaggatcagatcaaaaaaacaaaagttcaaattaaaaagagaaggttgtgactgc

SEQ ID NO: 744 - DNA, 396 bp, Homo sapiens
  misc_feature (1)...(396): n = A,T,C or G
aaccttgagaaacatgcctgggactaccgtgcctnggagggaggggccagacaccatggggagccataacccgaggtcccccaccccggtcattnccancaanaaaaccgggtccttggaccaanccaccacccagccaagcttnccaagggcacatgaaggggaagtcccgcccaaagatcaagcaagcccgggcaaagcttgacccacaagcccaacttgcaagacgccatgaagcaaagcctttaaagcaagcttgaaaatccaccaaagatcaaacttggaaagtctccaagttcttggggtgccaagtatttctttgtttgtatgcccaanaaagtattggggggctcttttgttaatttggattaaattaaataaatcattggggttaat

SEQ ID NO: 745 - DNA, 211 bp, Homo sapiens
  misc_feature (1)...(211): n = A,T,C or G
ggagtatgcctttgatcttctgaaacaacgcagaaacggacccggtctcgcatgctgagttagaagaactggctttgtcaacatcttcctgattcgatttcacggcagatgttgttcttggaaccctgtgtgaagcatttttagnatgagttgtaacatgcacagcctggctagtaatgagtttattaaactgctgcttatgtgtcttgtt

SEQ ID NO: 746 - DNA, 527 bp, Homo sapiens
  misc_feature (1)...(527): n = A,T,C or G
ggctacctgcacgagtngacttgagggatgcttctcatggatgcngtagggncttttcctcaaccntatcccactnaattaatggcncgctgatcacaagtgtnatgaatagaaagccnaggnaacatcttaactttgcatgaattttattttggctaacgaaggctctgcagaatcatgaagcaaatgagaaagatgatagagctccttggcggngaagcagatatattgagaagatgagaataaagacaaccgttgaaaacagtccaggaaaataaaaagcctggacaaataggatagtttgctgctgccttattactctgccattgcttcatgataatcagttcttcatggcttcttcatgcctctaatcaacagacttacttgtggacatacaaaaccaagaatctagtccagtaaatttgaggggcttcttggtacctcaccacaactaccttctgttaattaatgngcaaatctttgaagaaattatttgaaaccttgtaaaaggtatgattgggaaaaat

SEQ ID NO: 747 - DNA, 198 bp, Homo sapiens
gagaggcacaacaacgattctatgccaggggaaagccgctgggcctgctccgccctccaattaacccattttatctgagaggctggaaaggaagaaggtacaaggccaggggctcagctatgaaaacatgttctgaatgggataaaaacagcagtgggaagcctctgtcttatataaataaatagtagatgttaaagt

SEQ ID NO: 748 - DNA, 909 bp, Homo sapiens
  misc_feature (1)...(909): n = A,T,C or G
gtagaactnaacntngcggttgaggacaaaactcttcgcgggncttttccaagtggggggaatcgaacgggtattcnnaataaagcttttgatggaancccccccccatgnggaatcggggcatttgaaacaaagaaagggaattgncaccgccaanggtttctttccgggcccgctttggggtgggaagaagggcttatttcggctatttgacttggggcaccaaacaagaacaaaatcggcttgcttcttgaatgcccgccccgtgtttcccgggcttgtcaaccgncaaaggggccgcccggtttctttttttttcaaagaaaacgaaccttgtcccggggtgcccttgaaatgaaacttgcaagggacgaagggcaagccgccgggctatcgttggggttggccacagacggggccgtttccttgcgcaactgtgctcgaaccgttgtcacttgaagccggggaaggggactgggcttgctattgggggccgaaaatggccggggcaangatctnctgtcaatctcacctttgctcctgcccgagaaaagnacccatcatgggcttgatggcaaatagcggcgggcttgcaatacgcttggatcccggcttaccttggcccattcgaaccacccnaagccgaaaacaatnggnattngaagccggaccaccgttaccttcgggaatggnaaccccggtctttgtccaaattcaggaatgatttctgggaacnaaaaaaaacaaattaangggggctttgcgccaagccccnaaaattggnttngnccanggctttaaangggggccgccaatgncccccnanangggcgaagggaatttttcgtcgtggaaccccattnggcgaanngncccngncnntttttccaanaattaaatgggggggga

SEQ ID NO: 749 - DNA, 342 bp, Homo sapiens
aggactgggtggaggctatgtccgcctcccctggaagccctcaaggacccacagaagtctcgagcctgccagtgtgcagcgggggacacagatccgccctctgcaccgggagcatcatgtgaagtctaagaaagccctgcaggaccagccgtctcacacttgtcgtggaaaatcccatcagcacacctctgactcccacgtgggaatcaccaggccatcaccatcaaaccgccctcccgcaggcaaaaacggcaaacgcagccctcccatgctcaagggaggtctcatcgctctgccatagtcctcacaaatctccaaatacaaccaagatgtgtctccccc

SEQ ID NO: 750 - DNA, 216 bp, Homo sapiens
  misc_feature (1)...(216): n = A,T,C or G
gaactgagagacaggatcttgctttgtcacccanggtggagtgcggcagcacaatcatagctcactgnaaccncgaacttctaggcttaagtgatccttttgacttaacctccagaacaggnttttaagtcatgtgcaaagaacttacttctccatactggaagtagaagtttctcaaaaatttaaaagcaaataaacttatacgtaatttacttc

SEQ ID NO: 751 - DNA, 875 bp, Homo sapiens
  misc_feature (1)...(875): n = A,T,C or G
ctcgcggttgagggacaaaactctttcgcnggcttttcaagtgggggggatcgacgggtattcgaataagcttttgatgaaacccgccccccattngggaatcgggnccatttgaacaaanaatgggaatttggcaccccaggtttctnccggcccgctttggggttgggaagaaggctattcggctattgacttgggggcacaaacaagacaaatcgggcttgctcttgatgcccgcccgtgttccgggcttgtcaaccgcaangggggccgccccgggttcttttttgtcaaagacccgaccttgtcccggtgcccttgaatgaaacttgcaagggacgaaggcaagccgccgggctattcgtgggcttggccacngacggggccgttcctttgccgccaagcttgtgctccgacgtttgtcacttgaaagccggggaaaggggacttgggcttgctatttggggccgaaaagtgcccggggggcaaggatctccttgtcatctcacctttgctccttgcccgaagaaaagtaatnccatcatgggcttgaatgccaattgcgggcgggcttgcataacccctttgaatnccggcttanccttggcccattcgaaccacccaagccgaaaacaatttgcatttngagccgaagcaccgttacttntggatgggaagcccggtcnttggtccaancaaggaatgaatcttgggaccaaaaaancaatnaagggggcttttgcggcccaaccccnaaattgtttcgnccanggcttcaaaggggccgccattgcccccaacgggngaaaggaaatnttcgtcntggaancccaattgggggaaagnccncnnnnctttnccaaaaattaaatggg

SEQ ID NO: 752 - DNA, 746 bp, Homo sapiens
  misc_feature (1)...(746): n = A,T,C or G
tctattngcntntgcaaacatgggatttcaaaccngcttggggggcctttcttggactgggttcaaaccccnaaaaagccaagggngggggaatnaccantnttnaccnaagctgggttgggcattttcccaaatttcttgggaaagaaccccnaagaaccaaaaatttccgnggagaaccttnattgaacccanancccnttnggaaataaccggggcctttcggggggcccttgaagcttgggaagaagtttgatgggcaaaggtcttcaagtcaaagggcacttcaagcttcaaaaataccaccaccacctggtttgccattattaagaagcttgggaaattaaggcaaaatatgggaccagggaaatcttgaaatttcttgtgtttgggaaatttgatgaagggtcaaaaagtcaaaccaaaatttcttgaaagacgcttgtcaggaagggtaagaaaagaaaaggtatcaagcacacttgatcaagccagcctaacttgaaagatgatgtattggaaaggggaagttgggagtttgtttgaaaacccaagggngtccatgatccctccccacttggacctttttttaaanaaaaattcttgnggccccgccattggtatttaaaaatcctcgccattcaagtcnttccttgcaaaaaaaaaagggcccnnnggggggccnattngggggttggggggttaaccaggngtgggnnttnttttaaaaaagggggggggggggg

SEQ ID NO: 753 - DNA, 349 bp, Homo sapiens
  misc_feature (1)...(349): n = A,T,C or G
gctacctgcaagaagtcagaacttgagctcaagaaggaaaatcaactgggtggaccccggggccttnccccacacttnnnccnaaagaaaattggcccccncccctttgggaaagcgccaaaccnatgggggcctttcattcttttattgccaccaagacattagggnttcaactttcccgcttggccttnaccnttaagaatcattaagaatgccctaanaatgggaggggcgaatggaccattaaaagctagctcttccttttcctcggtgggncttggngggaaagtgacctttttgaaagtaaacccagcaaagtaagcattcatcccaaccaaaagtggggatt

SEQ ID NO: 754 - DNA, 275 bp, Homo sapiens
  misc_feature (1)...(275): n = A,T,C or G
atctttcagccttgtgtgtcatctgcaaatctgaaccaagaaacaggcattctctttagaagaaaaatgtataggaagcctgctcagaggaagngaggtgctccagatgacctctggaagtccctgccaggcttatgttttgaattttctgtaacattttattatgtaaaacagacncattagctatgtttactcaggcacatggaagaagattgagacaattacctaaaaattcactgtgacttttcagtaaatgttattaaagaaaaagtggg

SEQ ID NO: 755 - DNA, 768 bp, Homo sapiens
  misc_feature (1)...(768): n = A,T,C or G
atggagtctcgctctgttggcccagggctgggaagtccagtgggcacgaatctttgggcttcggttgnaacctttcaactttccggggtttcaaaggcgaatttttcttggctttaagccctcccgaagtggggccggggaactacagaaagaacaaggcttgaaatgggtttccaagtcttttcaagtcctggctccttgggccaaacaacttgggacctcttcaaaaagtctaagccaaactccttcttccaagccgcctttgataaaacaaaccccctcatgcttgggaaaccacaagcaagtgggggcttgtttttctccctcatgcaccccaagggaaagcctctcctcttttgccttggggctttctttcccaagggccttaagcttgccaaacccattttacacccattgccgaaagcccaagtcaagtcaccttgaaagaaaaagggaagactcacaagaaagggcccaaagatgaaaaagactctttaaatccttggggggctttttgaagtttttggtttttaagcaagggaaagaccttatttttaaaaaacaaaattggttacacaagaaaattttgccaagtttaccaggaacaagatggaaatnaaaggacatttatnggncnnnnnnnnnnnnnnnnnnnnnnnnnnnnnnnnnnnnnnnngnaangggggggggggggggggggnttttttttttgngggtttttaaaaangggggggtttnttttttttnaaaaagggggggggggggggg

SEQ ID NO: 756 - DNA, 612 bp, Homo sapiens
  misc_feature (1)...(612): n = A,T,C or G
ttctttgactgccactttngcagggncctcaatcacttcctttgggcctcctggtatggggtggatgccctccacttaagttctggcccgatgtgctgtaagcagaagtaacgtgtagcacttccaggaaatctctttataagacagttgtcagatgccagtttttttccccttccactgcattattactgccaggttcatagccattctgaggatttcagaaggctgatctctggagaactgaggggttcgaaagattgacttctcaggagcagggctgagaatggaatgggcccttaatacctgacagtttcccaagccctgatgacacaaagccagtgtaattaattcagaacataaggcttctgattccattactgactcatcatcagtaagtggcagcagcagcagaaagtcacttaagcttcttgtgatcatggcaccgtgatgggcatcttgcatgctcctgnctgctgacaatggcacatatctgcagtgacgtgggccgctttggaaagtgagtagcntggggttagggnctttaaaaaatgggggtgggatgcagntttgcaaangctgngggtagaagnacccctgggtgaaacaactttc

SEQ ID NO: 757 - DNA, 139 bp, Homo sapiens
  misc_feature (1)...(139): n = A,T,C or G
ccgaagcacactgagatgcgcngnctggacnagnctatcgtggatggaaatgggagttggtggaanagagtcactctgntgctgctggccgtacaagatcgctttccccaaggaaataaattacatttcattctctatt

SEQ ID NO: 758 - DNA, 388 bp, Homo sapiens
  misc_feature (1)...(388): n = A,T,C or G
acactgaggcagtgggagagctggaggagcctgntacaaacctcagcccattagcatcncccagctctgtctttnganaagatgactganaggaaggtggtnttgagaaaacaaagcatncancctttgtgaagcnganccttaaggtcccctctccagncntggntgaccccanaccctcnttttcttctctggcntccaacttnaaggattggcctgtttccctttaactatagctaccactcagctnactcgctgaanaaggcanagcccacgcctcctggcacaagnttcccttnngctacctaaggcaagcgaatgagtctttttcatngtaatgaactgtatttcccttcttttggaaaaccnggggggtaaacaaataata

SEQ ID NO: 759 - DNA, 178 bp, Homo sapiens
  misc_feature (1)...(178): n = A,T,C or G
ttgcacaagttggttattncncaggtggaccccnttnaaaagatggnttttaaaaggaatggaccaanaattattttggattggaaaagaatggggcccnaaccaaaggnggnttaccttggnttaccccttcttaaaataaaaaggttttcattcaccttaggttttcacccattgg

SEQ ID NO: 760 - DNA, 586 bp, Homo sapiens
  misc_feature (1)...(586): n = A,T,C or G
cngaactngaggaancagngttcttagttnggaatngggggaaagttcnttcaccaacccagggctttatttccccccccccaaggaatctttattgctttctttaangggccccgggcttcactttcccngggaggaacttgaagaatgggcttggaaaaaatggaaagaaacagggggaaaactttgggaccccagaagacattacttcaggagggaaaagaaacgcttgttgttgaaagggcgggagggccaagaagggtcaagggggggattcatctattgaagccaccaagacttgccacaagacttgccaagccaaccctcaccaagaagccagggaagaagaggcaccaaggggcaagaagtctacctcatacccctcaagaaagggaggtcaaaccgggtgcttgataccttggatttcttgacctttacctttcaagaaacttgtggaagacaaataanatttctattgtgtaaggccaaaaaaaaaaagggggcccgggggggggccanttcagnttgggggacttaaccagggttgaaactttgtttaaaanggggggggggggggggccccccc

SEQ ID NO: 761 - DNA, 572 bp, Homo sapiens
  misc_feature (1)...(572): n = A,T,C or G
tgagctcctgcagnagtagaactgaactcntcatattccaganctcaagctnccaccatcatgcagnaagggctctancccnctctacgatgctacngncaacaggatctncaggccacngctcnggcccaggtactcacatcagtggttctatcaacactcaggacagacccatagaagaggcccaagcaggccctggaagtgcatgtggaggccaccaggcaaggaattctggagtcccagatcatatctgggtgtccatcagcatgttacttcacatctctgtacctcagtttattcatctttcaaatggaagcaacatatagagctgccttatagagttgctctgggtattagatgtataatatatgtgaactgcttggtactgggcctggtatatggnatgtgctcaataaatganagntggttattattgncatttattatcatcatcatcatcatcataattaaatattattccaagccacaatgtggttctnatagncaacaattatttaataaatgnaaccttttccaaacttccgatctgnnaaatttnaaaaaatattttc

SEQ ID NO: 762 - DNA, 544 bp, Homo sapiens
  misc_feature (1)...(544): n = A,T,C or G
gcagcctgcattaacgagnctgagatcaagtgaaatccaatgacatcaataatcctgaatttcttcttcacactcactcatgaaaagtctccgattttcccaccttgctcagccaccttaagtgccttccttcaagatatttcctactgcttctaaagaggatctcccattggcttgggagcagcgtgagaagagacttgtacacagagaggctgggcaacttgtacatggttgcacagatgtccagaggcagtgctgagatgtgaacacaggaagactggattcagcatctgtgctactaaccaggacactatgaagtctctcatacctgtggtactaggaaaatcagagaaaatttcaaggagggtggggcattagaagctgactatggaggaacccgnangagattgattttttggnaaannaaagggccnggcctttgcnggtaaaaaaangggagtgttttctggatgccaacacatttggggcgggcctaanatcangaatagatgggctggatcttcagnatggacttaaggttctg

SEQ ID NO: 763 - DNA, 658 bp, Homo sapiens
  misc_feature (1)...(658): n = A,T,C or G
ggctacctgcattnggngactgagatgggagaaaaatgagttcaatcagtagactcccatgaccctttcaaggtgacccatcattctttttccagaaagtggcagcttncttattttgggataagcgacgacagacgagaaaccacaaagaatctgcagacgcgagactccctgacctgcagatatacagccatctccaataagtctacatttaaactaaaacttctcctgttgagcaagcataatgtggaattatgttagcaagaccttatgcactcccacaaattttctcccaataaaaaaaactgttatcaaaggattgtcacccccccagacatacagcactgcagggaaaaaggagcccagacagccgttgggagttgacctctggccgcacgcctggggtcagtggagatctatgttgactttatctgtgtgccctttaaggaggcctcttgcttaaaataactaangngccnctaaattacacttacttgnaatgctggattaatggattcttntacaaangntgaaanacctgggcttttggccttcatgancctaantttaactaccatgaagcttctgaatctctacccatttggggtnactnccttttggggnaaaanaagaggtntatcaataagcctttttgagc

SEQ ID NO: 764 - DNA, 658 bp, Homo sapiens
  misc_feature (1)...(658): n = A,T,C or G
ggctcctgcatcggtanactgagtagtgtctagnagncanaaagacagtctcctgctggctttgatggaaagagcaaccaggaatgagttctacagctgcaaggaagtgaattctgccaacaaccaccagagcatggaagagaaccctgaggcttatatgaaactgcagcccctgtcaaaactgattacagacttagaagaccctgagaagagaactaagttctttctgcattcctgacccacaaaactccaaggcccgatagctctgggaaagcagaacttggccttttccaaaaattttctgcccttggttttggggatcatttgggcaagcccgaggtgctgtgcatgggggctcctggaatcctgagaagggcagaaagccttggccccagactcatcgtgcagcagctctgagcagtatttcggctgaggagtgacttcaagtgaatattcagctgaggagtccttggccacgtgtcacaaccctacttnttgggggcctgggggnaaaaggcggcntaaaaaggttccaagggcccaacttggaaatggnctgnattgcttgggtcacaccaggcggtaatttanccttcttttgagctggtaancgcctgnctctgaggctgggngagaaaaatatcacaagggcccaaag

SEQ ID NO: 765 - DNA, 507 bp, Homo sapiens
  misc_feature (1)...(507): n = A,T,C or G
gttggctttgtagaagaaatgatgtcctggaaaattgctttgaattgtaccatctcagaagtggggaaaaaaaaaaggttcttcatttaanaggtagccgngagcacacatttaacccatacccggaacaacatgaagctctgggagtcanaatgccttcggctgatattatttatggaagcccaccanatgtttttntcaatcccanaagccagggctgctgaaatacctnttcacataanaatgcacctacatcaggagcacagccaaaacctcagtgaaacatgcctttcactgattgctttctgcgggggtaaactcccgcaaaggacaaacccaggacagtgagcgggtgtgtntgnttgtttntaaaaaaaccgggggctcccgggatttnggttctntnccttggaagngcnncccctgccttntttttaaaaagnggttaaatgatgttaaagacttgcctttgactgngggttgaaccaggtgtccatgccatttctc

SEQ ID NO: 766 - DNA, 186 bp, Homo sapiens
gtgaagaaatgagccatagagaaggacttgcccaagatcacacagcaggcagagccgggacatgaaactaagcattctggctccagagtccacgtttttaactcaacggaatactcagcaatggctgagtctacgccctgtcgtcccctcctgggtctcacagaatggaaataaatgtctcaactc

SEQ ID NO: 767 - DNA, 225 bp, Homo sapiens
  misc_feature (1)...(225): n = A,T,C or G
atgaggcccagagaagctgactgactcaaccagtgtcacactatagtcgtaaaaccagaactatcttatgtagtcactaatttatgaacagcttgggtatctgaagtttaagccagctgtttaaaacagaacgaaatgttctatggtattaacatataagtgttaattaattaaattaccagactacatacacaccaaaaaaaannngggcngggggggccaatt

SEQ ID NO: 768 - DNA, 290 bp, Homo sapiens
gcaacaacggtcacatcctttcccttctgtgtctcagccacagtgtgggtgtgaacaagaaacccaagcagcatcctcatcctatctgcagctacgatgaggactccaacacttcctcaaccacatgaccactcggattcaggtgctaaagaagcacttgtttaaaatagctaaattgtggctcctgaattagctatgccaactattttcagttacaagtcttcacaatattttattaaagtattaagtcaatgattaacactgagaataaaaaaatatttgccctttct

SEQ ID NO: 769 - DNA, 524 bp, Homo sapiens
  misc_feature (1)...(524): n = A,T,C or G
gtcagacctggagaagtgcggagacaatggtggggaaagccccttacaaaaccatcagatctcgtgagaactcatccacatcacaagaacagcatgaagaaacggaacaaggggaatgcaatctcacaggatggaaataacctgtggtgaattgttgccatccagatccacttttaagtccacatggttcattcattttggactagatcctggtacagcccagtgaactgatattcttgaaatcaggcacagaggctctgaagtaatgcattacatttgcatccatgatttgcttaaaatgttccatttagcctttcctcccaggaaacaaagccagcagtatttgattattgaatagctcgttttggatgcttaantttggaaaaaatttttttaaaatttngggaaacttggnnttttacaaaatgaatcatgagttntttttcaagttttganttggctccaagggttgaaataacttanaagtctaggatcattatatattagctctattttacatgctc

SEQ ID NO: 770 - DNA, 173 bp, Homo sapiens
  misc_feature (1)...(173): n = A,T,C or G
ggccagacctctgcagaagtggtgtcaatcacttnactcntttcnttagcctactggnccccccnnttannancccnaaaaactttnccaaaggaaatcaaactacagaacagcaacaaactcaaaaaattaacatttggcttttgtgttattaaaatattttctcagcagac

SEQ ID NO: 771 - DNA, 548 bp, Homo sapiens
  misc_feature (1)...(548): n = A,T,C or G
gctccttcatccccaaacaggaactgctgcaaggcccgcagcagccatgggtgagtggctctggagatggggtaagtggcctacgcaccccagaggaacagctggcagcctagtcttcgggcagcagctccactcagccctggggaatgacagatacagacaaccagttatgccagtgaagtgccctaaactagagatagctggggcgctgtcagccaccttaacagtgagaagaagcaacaggatgaagtggaaacagcgtcacacagatggagcctcgaatcccagcatgctagccatgtgtcatcttcatagtcttcctaacgtctgtggcctcagatgccacatcagtaaatggcacaccatatgtgatttaggctaagggcctgagtgtaataagttgcttaagaattatagcccttcttaaataaatggagaaacagtccatgtttnnnnnnnnnnnnnnnnnnnnnnnnnnnnnnnnnnggggggggggggggcctttttntttgggtntaaaccgggttnnttttttaaaaagggggggg

SEQ ID NO: 772 - DNA, 532 bp, Homo sapiens
  misc_feature (1)...(532): n = A,T,C or G
cagcgcctggcagtctgcatcatttcgccacagtgtgaaaccattggctgatgtataaagtggaagccccaggaacctctcaaggcccagcttcagcctcaccttccctgtggtcttcttcaagcagacccataccaagctctctgtgctttggaaactgccagtgaggtgaagtggggaggcatcggagcgacagccacgttgtatgcctgctgcacgagccagaccgcaggacaatactcaatgagaggcaccaacatccatcctggctgagctgatgatggtgagaggccacagagccatgaaaatgacttggagcagcctccatgtattcctcagggttgaatcattgtgtgcaccacanancaattttntttttttaaaaaaaagntaaacacttgngaaaaaaagggggtagggcccnttccttgttttgaccaaggaacaaatgcaaaccagaccctgcttctntcaccangcanaagcttgctctttcaattcagagatatcttcaaggacccaattatgctcg

SEQ ID NO: 773 - DNA, 8 bp, Homo sapiens
gcaagaag

SEQ ID NO: 774 - DNA, 180 bp, Homo sapiens
  misc_feature (1)...(180): n = A,T,C or G
ccccctgcncatgaagaagcccatctgtggtaggagagagtgatgccnacncaccagagaaaagaaacgagagagaaagcagagagacagagacagagagagcgagcattctgaaggccagctccccttcccctgtgcttcccaggtcctgtgcttgccaataaactgccctttttcttc

SEQ ID NO: 775 - DNA, 121 bp, Homo sapiens
aatatgttgaatcctaattaccaactcgatagtattaggagatgggacctttgagaagtgattaggttataaggatggagccctcatggaccggattaatggaaagagaagaaaagaaaag

SEQ ID NO: 776 - DNA, 462 bp, Homo sapiens
  misc_feature (1)...(462): n = A,T,C or G
ggctgggcgacacctctgctccactgacaacagcctatcccaggcccatggtgcacccctccagcatgcaggagaagggaatgcctcctgactgaccaaggaagccacctgcaatctctctccagacctcccgcctttctggtccctgggctccctgtgacctgtttcccaagtcctcccctccagggcttaagagggaagaagaagtgacataggacagtcctccccacggcagcctgaaaggacctttgtgcagaggccagcatccagagcaggacaacctcagtgaggcttcctcccaactccccctttaccacaaaagcccttnagcaagctnggncntttaaaataacanaanccccaanntggaaggggcccttgaagtcattatggaacatcctcagatcaanaaatgaggcaaaggtatttggggaaataaaagctcaagaggggcggaaagta

SEQ ID NO: 777 - DNA, 341 bp, Homo sapiens
  misc_feature (1)...(341): n = A,T,C or G
catctgcattaagcgcantgaggctacatgtacacagttgtgcagctgaagagaccaaccagagctggaatccagcctacattccagtcaccacgcatgtatccggacataaagggagtactttttcctaatcattaagactcaatatgagctagtgggagatatgactgaagtcatgacccaatctaaattaacatcattatataatcaactgcattaactaaaaatggcaagtatacagcctcaaatcaataaaggatgtatgcaaaaaaaaaaaggnnnnnggggncnnttnagntnggnnttanccaggnngaacttgttnaaaagggggggggggg

SEQ ID NO: 778 - DNA, 523 bp, Homo sapiens
  misc_feature (1)...(523): n = A,T,C or G
gaactgaggaaagagaagccagctctataatttcacaaagtctccccaccttactcatctcgagtagtgaccaccgtgaatggtcccaccgccagcctcttgggaggcagccggggaaagcactccatcctgggacttaggagcatgaactctggagaaacacagacctgtgttcaaatccgagtccactgcgtcctcacaatgtgatcttggacacagatccaatgtgcacagcaaggcattcaaatagcacaaaggctagatcctccaaaggaatttcgccttcagctctgactcccagttccccagtttacctgtctggagccaccatttagaagcttatgtatataaagaattgctgacacagagacacgaagtgagcatttgctngttggggaaaaaaggggccntaatntntttnaccaggaattgccacaanccttnaattttgtaaaacaaggcccaacaaaacaaggtatgcggaagcagtccaggcagtacaatcagccaaaactgattatga

SEQ ID NO: 779 - DNA, 507 bp, Homo sapiens
  misc_feature (1)...(507): n = A,T,C or G
agaactgagcacctctgctgattgtggtggcttacccaaggcatatccagatcctcattcccaaggaatctcagtccctggtcccctgctgctgcatttaaccacttatcatcaataacaaacaagggagtatgaagaatgaattccttgcgtgacaaacatttttctccctgcccattgtgcaacagaagtgacacttcctccagatattcagggttaattacctctgctagaattgtgacttgaattactgttttaagccaactcattctttaatcaagttcagacttttgcctcattcattcgctgattgttacagaggtgtaagttcagaggttgccatctagccttcctcactacaatagctttaatccacaggccnaggaaccncgtgngaaaaaatnggctgggttcccaaagngggntttttccaactatcattcaggcnctggaaaaaaggacttctgactgagtctgggaacccgatggcncattgcaatttaaaag

SEQ ID NO: 780 - DNA, 478 bp, Homo sapiens
  misc_feature (1)...(478): n = A,T,C or G
cagccggaatgatgctctgaagaccttgttggacagtgcactcttcactcaaacctgcagcagatggaatgatgctctgaagaccttgttggacagtgcactcttcactcaaacctgcagcagctggaacgatgctctgaagaccgtgttggaccatgcactcttcactcaaacctgcagggctcccgcatctcttctggagcagaagcccacctgccagctcatcccgactgtgctgctgcctcctcttccccactggctcagccatccatcaggccttgtgcatgcagctggccagctccctctccagggaacacttttcccctgcatctacttggccaacttcctgatctcttttaactcattcaccttctcaangggacagantaacgctttggggactnaagnccaacantctngacccatctccaangtttctatccctngttggctcctacaggacataccctatttgctt

SEQ ID NO: 781 - DNA, 491 bp, Homo sapiens
  misc_feature (1)...(491): n = A,T,C or G
gaggatgcagcactggccccacagcgcccacatcctggctctggaaacactcggtctcctgattcagtgaggctacacggaagcatgaggcccagctttgggacaactatgacatctgcaaggctgcaaagaggttttagggcgagctccaggctggtctctgcggccaactgactgtgcgtcacggttcaggagtccctgcagtagccacagccgtgctcctgtaaaacgtttgtgggtcctatgtttacattctctgactctgaaaccatcgatgtcaccaaacacactcctgttggcctgtgtttaacacaatccaattcagacacatgaanatgatnangtgtggggtgccaagctgaaagtgctactttcagtttggtaaaagnaaaatnntaaaagnactaactttaacatcccaaaaaattattnttataccaaaaacatttttagagattgaagaacagtataaaaccttttcctgttcactg

SEQ ID NO: 782 - DNA, 193 bp, Homo sapiens
cctcaggtggtcgctggaggatgaagatgtgtctgaggctgactgagatgagctaatggcctgctgcccaccagatacaagaatgagctccagccaagaccagaagaacatcccccctgcccaagcgcagccaaggtcaacagaactgaccacatgacccatggactcgtgagaaataaattatggttgctgt

SEQ ID NO: 783 - DNA, 537 bp, Homo sapiens
  misc_feature (1)...(537): n = A,T,C or G
acgcctgactgaggctgtacaagatgngnggtgccagcatctgcttctggggacagcctcaggaatctttcaatcatggaagaagtgctccccctggaaatcagagaactgtgtgtatagaagatggaagatgagagagatatggaagtgttattatgatggaagtagaaatgtctgagaaagtgaagatctagaggctcaaaagttgcctggagactctagactggagaagaaatggaagtatagagaggttgaccagctcaaatcactctctcaggaagcttcagagctgagatccaagctccagggtacttggcttcaaggccagagccactggtctagagtgccatagattagagctaggtatttatgggaaatgnggnattctntaaaatggtcaccaggganaaancttttggngggaaaaaaatttgacctccctnatcctctccacaatctctttaacatctcatatctggcatggccacacagttcaaggcattcaaacgattgccttcatgggtttcttgctgatgg

SEQ ID NO: 784 - DNA, 241 bp, Homo sapiens
ctgttatcctcctatttgtaaaacggaggcacctgggacccagctccagcaaggagagtgaggatccgactccaggaggcacctcaggaccaaaggcctcaaggccaacaccttccacggcacaagccccacagggctgcaggacccgtacaagcagcggaccatccctttctcttcttgactatgttttcccctgatgctttgctttccacatagaagagttttccattttcgtggggtc

SEQ ID NO: 785 - DNA, 308 bp, Homo sapiens
aactgaggagggaaatttggacatggacacatagggaagacagccatgtggagacagaggcagaggtggacctgctgccgcaaaaccacagggcgccaagtactgtgggccactgagaaaactaaaggagaggaaggattcttccctggagctttggagagggtgcggccctactttcacctggatttcagacttcagacttccagaaccatgaaggaataagctctctttgtttcaaaaccactcagtcaaggcactttgttacaacagcctaggaaactaatacaggaattggtattagtaaaatc

SEQ ID NO: 786 - DNA, 377 bp, Homo sapiens
aactgagcatctgcctcctgtgtcccctctttccctgttgtacggctaacaccagatcccagtctcttcagtggcactcaactttttcaagtcacaagatggaagcgctttggaagaggagtaaaggacctggactctgattccatgccaccgcaaactcgggcaggcacttcaaagcagagagtctcattttccacttctgaaaaacacatggtctagatgagctctaagtcctttgcactcaataatttcacagtcttttttattattaatattattttcaattgaaaaatcataattgtatatttatggggtacaatgtgatgttttgatatatgtattcaataaggaattattaaatcaagataattaacatt

SEQ ID NO: 787 - DNA, 208 bp, Homo sapiens
gtaagcagacctctcctgtgatgttctggatatgcctgtctcaacagatttcagggtggccgtcttctctgcaaattcagttctctgatgtgtccaagccttttcctgcctataaatccagcctcttctcaactcaacagaacattcaattttatagaatgaggtgttgcctcattctagaaccacaataaaagccaatttgatcttt

SEQ ID NO: 788 - DNA, 523 bp, Homo sapiens
  misc_feature (1)...(523): n = A,T,C or G
agtagactgaggcccaaaatgcatggcacagggaagggtttgacaactttttgatggatgaacaaagaagattcaagccacttgtcaacaagctcaaagtgattgaaagtggaagcatttacccacacgctcatgcagaaaatgacaggaaatcatccagagacacttgtgacagagatgagaactgtcactgttgagaggtgctgcggagatgggtgtccacggatgaccgttcggaggccgacttcggggatgtggccccattagctcaagagtgggtgactccctaccacactgatggcgttggccaggacaggacaagcctactgcagtgacacagtgtcactgatccctgatgcccacgtgggnggtttactttnactaaagccgggnanaaanattgcaacaaganaattgaggccccagcgntgagcagcccaatcacctggttgtaagcagcgaagtgttttttggctntgctcntgggccccaaaccactgtgggctcacgaaagaatctttca

SEQ ID NO: 789 - DNA, 501 bp, Homo sapiens
  misc_feature (1)...(501): n = A,T,C or G
aatttatttgactccaagtccttgatcaggaagacaactcctaaagataacaatcttcctaaaggaaaatgggactgttttacaaggagccacagaatggtggatctgagaatccaacatagggaaacccactgcttcatctaccattatgcgcttgtatatgcatgacttcagggataaatgggagccagaagtacaaaggaatcttcagtagtagacaaaacgcagaacccttcacggtttgaccagggtcattgtgtgtctgcctggtcatttgaccagctcttacgaatcaggaacccagctgaacctcagttgaaccagcccctccaacagaactgaggggatttggggctgataagctcantgctatgtttacacgnncgcctttttntaaaagttgcagtttttgnaaatggaanctatatttgggtngcatatgatttctataatgnattactgncccacccctgcacatccttcagagaacagtaaccagcc

SEQ ID NO: 790 - DNA, 506 bp, Homo sapiens
  misc_feature (1)...(506): n = A,T,C or G
atatttcctccaggagtaatggatgcctgatcatctgagattacatctgcttcacgcatacaaactgcataaggcaatgatgttgcagaggctccacatcatcactcacgttcagaacagacaggagcagcagcaggaaaggaggctggaaattaaatcgtgaacttttggattgtgattttaaaaatatatctgaaattatcatgtacatgaataataacttgtaatagaaatagaaaagataaactcctaagataatgtaaaaagctaaatattttaaatattcatcttttttatggttgagtgaatgtttgatatctcatgttatcttgattatctctgacctctaaatacctggatctccaccccctctatnttcttanatcccctttcccnaaagggaaaagcctgggctttaattggaggaaaataancctaaaagcctggccgataggggaaattttttttctagttttaatttgaatatttatcatcaaactgaactt

SEQ ID NO: 791 - DNA, 421 bp, Homo sapiens
  misc_feature (1)...(421): n = A,T,C or G
acgggtctgaagaagcaaggactggcaagtctgatcccccactctgattctcattgctgaatgtctgggtcttccttgtgtacctgctggggtgggagactgctcgcagcatacctggcctatgacatgcctagctctctggggtggatcttggacaggaagactgcttctgccagagtaaagaatatgacggagctcctcatccgatggagcctctgggaagaggcgaagagccagctggaagcctggtgggcctccgctgccagcaggacagatgcatcaagtcaggtttatgggagaagtcttcccagaccactatgtccaaacttctgtccatnctgctataaccnntttcnncgttnagtnnggnngaaaaccanaccanttcanccttggccaaaagctgcaaagataagaaccc

SEQ ID NO: 792 - DNA, 361 bp, Homo sapiens
  misc_feature (1)...(361): n = A,T,C or G
agaactgagaaaccatgaagttatttggatgatagatacagagatacgctgctcagatgcccctttcaagaaagaacttgctgcctcttgctcaagtttcttcctggagctttcaagcatctttgcagggaagtcacatccttcccagggcagcccgactgaccaagacaccgatacctgaagctatgataaccttcttgtgaccaggagacaacaagcagaaggccaaaaatacccaagaatggcagagcagaaggatggaaggagctgggcttcattataacattggagagtagccagaccaacaactccagcaaccaaataactctgttttctttttaaanggggtattaaatgaccg

SEQ ID NO: 793 - DNA, 316 bp, Homo sapiens
tctggtacaatgcctgtcgtcacataagtctggcttctttatgtgcttgaggaaaaaggattgaaaacgaagatcagaacccagcgcacgacaatgggatcattttttcagacacagcctcctgcttcatggagctctgcccttcctgccggagcaccgacctccgaagccagcacaacagaccctccaggctgcccccagttccttcccctgcccttttgaacttaacattgcctgttagtgctgcctctggatggtctgttaaccttaccatgctttgagtcaaactggactgaagtagacttctggtcaaaac

SEQ ID NO: 794 - DNA, 556 bp, Homo sapiens
  misc_feature (1)...(556): n = A,T,C or G
ggcnggtcnanccttnnggttttngcntaannccngnccnncnngttngaaannggggncctcnagaaacnaaaaccatngtancccnttgatcccctnacgggnggtcccaaaaaacaaggaagcttcgaggccatgagcaaaatataccaagcccaagtggaacccaagcttgtcttnccccatctgacccggtggtgcttttgggccattgggcatgttcttcacccgcctggggttcttcgtttaccgaangtcacctctaccaaagtacactcgnggataatctataaaagaactcctcatcttccttaagtgggccctcactcttcatggggcttttgggaaggccctcnttccttgcttggctcttggggttggnaatctaaccgtgnggagcacccccaangggngaaaaaaaccacaaaanggggntttctttgnaaaacccnggcttttttggnaaaaanaacttttttttttaactgggggggnngggaaagnggncccaccctggcttgggtcaataaataaaatggccggaatgtcataagcc

SEQ ID NO: 795 - DNA, 511 bp, Homo sapiens
  misc_feature (1)...(511): n = A,T,C or G
attaaaaaaagaaaatgtgaatatgaaagcagagagtgagagtgaagaaggcacaaacagaaggacattgggaacaagcagccgctaatcatcatcataacngactcaggctggatctgagaaaaggaaaaaaagtggataaagagtgtgcacttctgttggggcaatgactccggggcggaagaggctgaaagaaaggaccaatgcagggaggaaaagaaattgcccaactccttccagggaatgtagatgaaaacatatagacacaattgggagaaaatttggggcagctgatctgactatgaactgttttgataagatgaatgaccagaactcccaatactncttgagnagaaaatnttcccctgcccctacaanaanaggctgngaanacactgtttgaactcagaccatcacaaaagaacagtatgattattgactttcaatgagtttcttacaattttatacctaattactatgctggcaataatgattatgtagaccattaaat

SEQ ID NO: 796 - DNA, 511 bp, Homo sapiens
  misc_feature (1)...(511): n = A,T,C or G
actgaggtaagaagtctgtaattttgactgagaatgaaaaccctgctgacatgatgatttgtggcagataatgcaactgattccatagagatcgcttgagatcacaagtgatgtgaacaatcaatctgaaaaataaaatttattcaggccatcacttcaagagaacactatgaataggtgctggatctaatgacctttcaatggaatggccacttaattcaatccaggaaatgtttgagagtcaagtagatcaagggagacatttaatgacatggggacaagcatggtaccccagggatattccaggaattgagaccctattgtaccttcaaacctgagattgnatgaattctccactatttggggggcttgggttncctttntctcccctncaaaaaaggnctaaanccatcttgcatagctttaaaatgaaaanctctattagcaaagtttgtaaattaactcttaaaggctcttttcaaggtagattaaaaataagctggaacccttg

SEQ ID NO: 797 - DNA, 525 bp, Homo sapiens
  misc_feature (1)...(525): n = A,T,C or G
agaactgaggcttccagggctgtggggccaaatgtgccctctcctgccctcatggcaagcctcagttcctgagttctcatcatttcttccttgctacaatcagaactgagtctagcacccttcaggacaaatccagatccccaggagagacagcctgatgagttcagcttggaaagggtctgttcctgtcctatcagctgtggccagcgtgccagggtcacgtaccagtgcgactgccacagcacggcccatctgtccaggagtagttctcagtcaacgggctccagctgggactcaggctgaatagatgcccacaaggatgtctgctaccacatgtaaagtgccccaaagcaggacaagggctcaacnagggngggccccgtttaatnaagggaattctgngtctgtctganaanaaagtgggcgatgagcaataacaaggcctgtcgtccatctggaagaactccagccaccccccaaactttcaggtgcatagaaccacctggacataagacacaaacattt

SEQ ID NO: 798 - DNA, 321 bp, Homo sapiens
acaaataatctctacagtggacctcaagacttcatactaagattctgaagatgattgagtcaatggatgagtgtaacgaacttttggaaacttcaaggcaattaaaggaaactgcaggaggaccagaaaagatcaagaccagggcacgagggctgatccaaacaacgggggccggcatttgtgatcttgggtagagccaccccagtgtgggtcaactccacagcattaggaaaaccagtttatcagaattaccttctcaagcaatagatctgttccttgtcacattcttagaactaataaagacttatctttattactact

SEQ ID NO: 799 - DNA, 354 bp, Homo sapiens
  misc_feature (1)...(354): n = A,T,C or G
actcctgcattaggtncaactgagtttggagatcttccccaatatgcccagtggattctcccaccagggccaggtaaccttcctcaccagaggtgagcatcttgggaaaaagtacatcctgtctttgcccccagaggtgacttcaaagaggcaggtatggtcaagagagacactggaagatggaagttacttcagtgttccagttgctggtgtagccagggcttcacagcgtggaagtatggcatcatgatgtctactgcacatctattcccaaccccatattcagttgtttcatgtagtctcttgaaatctatggaaactagaaaacactacaaataaagccttgatttattg

SEQ ID NO: 800 - DNA, 409 bp, Homo sapiens
atgaagaaagtgaagtccagtaaagatcaagtagacctctcatgtagacagcgggaaagagctaagactagaactcagatctccaaacagctacaacagctctgtttccagcaatgacaagttactggttccaagaatgctcttccttggatctcagcgccttcctcaggaccctctctgcgttcctcacatgctccagtgccacgtgaacaatgaagcttccctgagctggactgcaatccagcaagtggctattctttcaacagtggagactgggcttcgctgccagggaaagtcccattttaagggagaatttgcagtgggccgggactgcgatatcttgtgaccacagaaagatcaaacagggcaccttgagtatgtgagtctatgagttttaccattgaaaaca

SEQ ID NO: 801 - DNA, 399 bp, Homo sapiens
  misc_feature (1)...(399): n = A,T,C or G
ggctcctgcttagtcnaactgagatgcagaaacccggcccagggaagacgcagcttgagcaaggtcaccggcagtttcctttgcagtaaaatgggaataaaaagaaaatctacataacagtagatattctgtgaggattacgtgaattcatatttgaagagtgagtagaagggttcctggcacaagctctacaagtgtggctggaatgaatatgatgatgaggatgaagatgaggatggcggggctggagctcaagtgccatactgtgtcctggagcagaagccacgtgttgaggacagtctggacccttaacgagggttgagccaccgacaccagcctgtgactgtttacctcttgagtttgtttacaggagaanaaaataaactctctccctttgtt

SEQ ID NO: 802 - DNA, 292 bp, Homo sapiens
  misc_feature (1)...(292): n = A,T,C or G
actcctgattagtnnaactgaggaataactttcttctatcttcaccttcccttttggctacagccttaagaagaagtggcagaaaaacatctgagatgaagagagaccctaggttcctgacatgtccagcctctgagtcatagaggtcatataaaaaagtaagagagagaaaattgtgagagataggctgccctaagagtggaaggcattgaatgttacacacagtttggagtcatttgcagacaatgggtattaacctttagttttggtcatgaataaatagcttattggg

SEQ ID NO: 803 - DNA, 486 bp, Homo sapiens
  misc_feature (1)...(486): n = A,T,C or G
gtttgctgcatatggttggcacactgtgcactggacaatggaatgtggctgaccaggcattgggagagatggaaatccaaccccctgaatgctcacaaccgtgcaatctaccattcccctcatgaacggatgcccttgtcctacttactgcatggactagctgcagttctgtgaacataaataagaatttagcactcatggacattgcctcaatggatcaacacaacagcctaataagctgagtcttatttcccagatgaagaaattgaagattataggtgttaagtgacttgctacaatttggaagctagtgagtccaggtgctacagggtaaggaaagcgctgcctatgcgggatgcccnacctnnnggnaaannctttgggnaaaaaaatgancctataaagtcctaggaccaaggcctcctttttgctgtcttctcgtctctcttggaccttcaggcgccccgcttgggtttgttccaagtg

SEQ ID NO: 804 - DNA, 440 bp, Homo sapiens
  misc_feature (1)...(440): n = A,T,C or G
agaactgagatgtcaactttttgtaagagtcggatgccgttctttcgctccatcctaatgggcacttggtcatgtgcccagcaacattcactccagaaagggaatctgcttcctgtgcaatagaactctgtctggaacaaccagggagatgttttcatccacatggacaganatttccggcacctactggttttcccacccacactgagtgttgccctctaaatgagtcactctggtttccacagagaggtcaggtgtctctcgggagctggacttcctgaattcactccaccacgttttatctgtgtaaccttgtgcagggtacctaaaatctctgttacctcatctgcaaaatggggatacctaatacttngagaggtngtggtgaaattaaacgcaagggcacttggccaggagcggggcacacgataaatccattg

SEQ ID NO: 805 - DNA, 513 bp, Homo sapiens
  misc_feature (1)...(513): n = A,T,C or G
gagtgtgatatggcttggatctgtgtccccaccgaatctcatgtcggaggtggggcctggtggaggtgactggaccagtgtgctttcctgttcttcagattctacaaagagaaacactctgtttcccagacttgcttacagcaagggacttagatcccgccagccagaggcactcccgtgagatgggcagctgtgcaggaggcatctgtcctgccgtgcaatgctcaggcacaaccagttttggagccaacagtcctgacattgactttctatccctcagacgccagccaaggcagtgcgttcctggaatcaacgctctcaatagcagcttcccaatccttggccaaagtgatgtcactcaaagccagcgggtatgacaaaagggnttntcnaccctnanatnggggnaaagttcacagtaccctggggnggctgattntgcagggtgttttttatgcatttctgaaggccaattaatagcccatttctccagctcttccaattattttttta

SEQ ID NO: 806 - DNA, 161 bp, Homo sapiens
ctgagagccaagaacatcagaggtgggatgatgatgcttgtggctatgagacaggatttcaaggatcctgatgaaacgtctgctggcctgtatctgtctgaatgctggaaagggctttgtgttactcgaactgaaaggaaaacataaaatgatgataatgc

SEQ ID NO: 807 - DNA, 488 bp, Homo sapiens
  misc_feature (1)...(488): n = A,T,C or G
gaactgaaatggaggaaagatctctcttcacaagacttaacattacatggctgggtgtggtggctgaaacctgtaatccctgcacactgggaagccaaggggaggactgctttagcccaggagtttgagaccagcctggacaacacgtttaggagattatttgaacaagaaccgaaattgctccttttaaatcagaaagcttgacaatatgatggcaatataaacttaccagcaaccatacagacaccaagaagagcccatcgcaacccctggggtgcgcctggaccatccttcctctccgaagccccgtccagtattcttcagctcccaagttcaagtgactgncgagcctcacagactttnaaaaaaacttggttcctntgtgggggccncnctnctttgacctcacattntcaagccgagtgttcattgttgcggttcttgtaatgtttctgcagttctaataaaaacaggagccaaaaaaaaaa

SEQ ID NO: 808 - DNA, 362 bp, Homo sapiens
atttcttgcccaggagtgttcctgcctggcaaacaagatgtgtacctcggggtctacctcatgaatcagtacctggagaccaacagctttccctctgcgttccccattatgattcaggagagcatgagatttgaaaaggtatttgaaagagcagtagatcctggagctgtagtagaccttttggaaaacggagaccctagcaaggcagagacagaagcggctggacatcgagaggagtacattggcactggcagaacgacacggagtttggccggggcagttggaagagagccggggctgccgagtggcccaactccaggggaaaaccatctccctgctggctcccccatctgctgatagct

SEQ ID NO: 809 - DNA, 336 bp, Homo sapiens
cccctggactgatgacgtttgctgtatcaacctgtaaggagaagctctctccggatggctatgggaatgaaagaatccgacttctactctcacacagccaccgtgaaagtcctggagtaaaatgtgctgtgtacagaagagagagaaggaagcaggctggcatgttcactgggctggtgttacgacagagaacctgacagtcactggccagttatcacttcagattacaaatcacacagagcatctgcctgttttcaatcacaagagaacaaaaccaaaatctataaagatattctgaaaatatgacagaatttgacaaataaaagcataaacgtc

SEQ ID NO: 810 - DNA, 527 bp, Homo sapiens
  misc_feature (1)...(527): n = A,T,C or G
agaactgagactctttccatgatgagactattcacatcatggcagctgaggactgagatctctttctattgtggatgaaggaagatactgtgtgtcatcagaccaacttcaggcttccattgagtcattgtgcctttacaccaccaccagggaggaaaattacttactttctaccaaggaagcagttaaatcgcaaagctcaataccatgtgatgtgaagactcattttagatcagcccaagaaaaacaccattaagcagagaccgagcctgtggttgaaagatatggagtcacatggcagcggccacacctcctcgaaagctaaatccatgactgggccttggtccccgcaggctcctgcctggcctgccccttnctgtgctgggaaaatgggaaagggacnttggggcaaaatnggagganccctgcctttgacaaggcacatacaangggaaagtctgtcaaaaagcattngttttactttcttttttaaaagaaaaaaaaatactgttatttactgctttacc

SEQ ID NO: 811 - DNA, 398 bp, Homo sapiens
  misc_feature (1)...(398): n = A,T,C or G
gctcctgcattagtnnaactgaggaatcccagtgattcaagagtcattccagagaaatacacgactgaagatgactggttacccttctagaaagaggggaacaaggcctccctagttccttttgcttcccagtgaatacaccgaggcagaagagcctttcctagaaaatgtcctgggccattatcttcaaggggcttcagaacttctaagaagtgtaggtatccttttgcaagggaaaatgtatatgccttaacgtaggcgatttttgtggcacctttctcaatgaagaaaaggtgtctttttctccaaactaatttgctaattaacctatcagtcactatttacacatgaaacagaattcactccagattgttcaaatgaaaaacatttataaaagg

SEQ ID NO: 812 - DNA, 348 bp, Homo sapiens
ggttctggttaaagccaaaattccagaaaagacaagtcagcactgcccatggcagggatacagtgtgaaagcaactcaaataacacctgttttttgaagatgccacaggcagagtgttggagccagagggccaagacactgaggaagaagagccaagctactgctataaagaaggagtgtccccttataaatgaagaacaaagaagaaggagaatacattattatctacttataaatcacacagagacacaaaaatagtgaggtagttagtacgtaaaacaggccatatactagctagaaaggcaaagcctactaaagaaaaatatttgaataaaggaaatgggatac

SEQ ID NO: 813 - DNA, 407 bp, Homo sapiens
  misc_feature (1)...(407): n = A,T,C or G
gtttnagtgattgggcagaggtgtcatgtgacccaagaccatccaataagccttgactttgggatttttgttggaccgcctgggaaaaagaagctctccttccattggatttgaaatgagcaaggcgtcagtctggatctgcaggtgcctgccctgcggccacatggagagtggctgccgaggactgaagctcacaaggagggaggcagaggacacggatgtggtgagatacggtcctaacagcatcatttgagccctggattcagccctgcctgccttgaaaccaatacataggccccaaatatattatttggaatatatatatttggaatatatattattagaaaccaatatattagaaaccnattttaaaaagcttataaatnggcngtgtttttgtttaatcc

SEQ ID NO: 814 - DNA, 442 bp, Homo sapiens
  misc_feature (1)...(442): n = A,T,C or G
ggtaatcactttgatcagtatgaggaaggacacttggaaattgaacaagcgtcacttgacaagcctatagaatcgggagaacagatcccattccaatcnttgtcaagtatgatgtcatgggcatgggtcgcatggaaatggagcttgattatgctgaagatgctaccgaacggcgccgtgtcctagaagtagaaaaagaagacacagaagagctgagacaaaagtacaaggattatgttgacaaagagaaggcaattgccaaagccttggaagacctcagagccaacttttattgtgaactgtgtgataagcaatatcagaaacatcaggaatttgataaccatatcaactcctatgatcatgcccacnagccgagatttnaagatttttaacccagagagagtttgctcaaaatgtcttttcaanatcccgcagggatgag

SEQ ID NO: 815 - DNA, 405 bp, Homo sapiens
  misc_feature (1)...(405): n = A,T,C or G
cacttggggcacatgaagactttgtacgaccttttctctgaatggaaaatgaattctcctgcactcagcatatcaaatcctgagagactttcctggaccgactttggccacctcaatttctgaaatgttatactgattacttctttaagatattgtttggcccaaggtcatgtaacatatgagttcattctgtgcatgaagctccccagagaacaacggtacacaatgtcagtttggttatggcatctgaaaactcataagagcagactttcattaaaagcagtattacccccagcccttgccttctgagaattcacatatgaataattaggagtctgtaagtaggggcctacctgngggacaaatttctccccnggtttttngaaannnaaaaagggatttttt

SEQ ID NO: 816 - DNA, 330 bp, Homo sapiens
gtttgggtttcggatttaagctctactagtccagggatcaagtagctgctatggctctgtttcatgccctctcagctctcaggagcgtccagcagcctcagaactggagcaccatgatgacaggaggaaaagacagctgggctgctaagcagcagcagaggggacctcacgtgttataactacacatttgggtgttgctttgtttaatgtctgtctctgccatgaaatgcaagctgtaagggcagagcctgtgtcttttgctcattgttctttcccagcacctggaacactgcatgcacataacaggcccttaataaaaatttggtgaat

SEQ ID NO: 817 - DNA, 363 bp, Homo sapiens
aactgagctggactggcattctatgctcatcctgggtctttctttgtctggttggctgcatttggaaggaccttgctgaacttgacctctggttatgctctgaaactgttctcttaaaaagctaacatggagtggtcctgccagccctggcaatgtctcaccacctgtgcatcagtgccagccaagttggaagataggatggatgcctgcacacttaaatttttaattgttgacatctctaagtctggaagtaattttgtcaataatgtattagagttacatagctagattattctacagtaagtttatggggtatactcagtttatttcattcaataaattgtataataaacacagatcccg

SEQ ID NO: 818 - DNA, 433 bp, Homo sapiens
  misc_feature (1)...(433): n = A,T,C or G
agaactgaggttctaatggccaaactggcaaagttcctgctgttgccctcacctccaaggctggtgctcctggactcagggtgtgttccaggtgcctgaagcatggcccacaccagaaaaaggtgctctgtaagggcagaaaccaggtcctcacaccatcggtgcatgataaaaattaactgaccaaataacacggtggtaccctcttcaaggcaacttcggagtcagacatgcctacgttctccttcctgctctgccacatgtgtgaccctggacagggtcctccatcctcttggcctcagtgtctttgccagcaagctgggaataagaatcctgtgtcatggggttgtcataagggggaaatgagatgacctaaagggncattttttaacntaannaaatgcctttcaaagcaaaataaaaaaggggctta

SEQ ID NO: 819 - DNA, 88 bp, Homo sapiens
gcataatttcagagaacctgtaagaaacctcttcaagctattgcaagaaacactcacttctaaaaataaagagaaatctgttttccct

SEQ ID NO: 820 - DNA, 423 bp, Homo sapiens
  misc_feature (1)...(423): n = A,T,C or G
gcctatccacagctcttcaaataaagcgctgngangnnagcnaaagtgcaggggctccttgagaactttccagggctaaccagctgctgaggagtggcctccaggaaagagagaagcactctgattcaggcagtgatttacacctaaaataccaactccatcatatcttcagaacaattcttctagaccttgcatctaaatatggagtcgttaactaacaacgaacaaaacctctggatggccgaaggacctaggctatacagaaagctgtgaattaccaatgagaacgcagtgagtcaaaagaataatggaattaaataagttcagaggctttaagtgtttcttaaaacacttatctatgaacccctaatcttagtcatttctggcacagttggtattcataagcatttgatcatcattctg

SEQ ID NO: 821 - DNA, 234 bp, Homo sapiens
ctagttctcttggagatgactgatggcatgaattctacttgcatggagtccccgagaaaccactcctcttcttcaaaaaagtacactaaatctcaggacaaactgggatgaccagttatcactgctgccaaccctgttttgtgaattccatttaagatgtccaactgagaacaaattatgtctcaaataagattgtattcacagaatgatggaactaaagttcttggtaaattt

SEQ ID NO: 822 - DNA, 294 bp, Homo sapiens
gattgaacccaaagctgccattactgcaagaattaatgcttattgccaagaaattcaaataaaggaaactcattggaaatgttcagagaggaaacgatgacagtgataattccaaatatgatgctttctccataaactatccatagagatggcacagctctcgatcaacctttgcctggttggcttgaaatgttttaagtctttgacataaaaattgtgaaaggactcgtcgtttccaaagtgagatgaagattttgttactgctgtttattaaaattttttcgttgtgtttcc

SEQ ID NO: 823 - DNA, 451 bp, Homo sapiens
  misc_feature (1)...(451): n = A,T,C or G
cacgtggaaagcaagacccctgagggcgcaggttttagtcaactttcattcagtgccgcttctacagagttgaacactttccggtacattaaatgctctcgttggttcagaaagaacactttgaaaagcctgtgttttgacgtctactcagaagtattggaatcaatgaagagtgggacactgaatctggatcctctctaaggaatcgttttccagaatacatcaaatgttacctgctttgtaaacctctccaattctctcaattccctctgtcatcatttaagcactgaccatcagaccttcctgtacctagacagcagctttctattggattctctgcctcaggcaccgctctcctccattcaaaccttcacaatcattatctctaacgtgaagaccatgccgnctcagggaaccccagaagggatcntngaacctttccaaaaaaaac

SEQ ID NO: 824 - DNA, 404 bp, Homo sapiens
  misc_feature (1)...(404): n = A,T,C or G
aacatttaaggaagtttctattttaaaccagccttggagggttttcatgacaaggaattgcacattggatgatcatttctaccttttgcaataactacttcttatttgcaagttgtgtttaagtgaacaaagacaatgataccctgttgagctggtaggtaggaagaaccagcgaagcgcacagttaccggagaggttatttgcccaatgttgagaaacatatgtgtgtattagaaaaaatcacatcgactcccaggaatcctgcaacatactgcaactgtgatgctgaccagaatgagtggagatttcctcatgatttctctgtgtgagatgcagagttatcattccacttgaatctgtgaaaagtgtctgattaaaaatcatacngataattaccatccggg

SEQ ID NO: 825 - DNA, 387 bp, Homo sapiens
  misc_feature (1)...(387): n = A,T,C or G
actgaccggaatgataacgacttgcagcgcggtgttgccgtccccaaccacccctgttttctgacaacaagggagcgcgggagaccggagcgctgaacccaaatccctcagcagttgcacttcattaagtcaaaatgtgacaagaagcttagagagcaacttgcagatctgatcacacagaacaatcagggaggaaactttccaggagttggtcgggggtggaggagggaggggagggccanagatgtgtacgtacagggaccaggacatgcacggggtcctgtaccccacctgcccagggcaggtgtcctggctgatgggagcagggaagctgtccctgggtgggatctgggaccctgggatactgggaccccagtgggggcctaa

SEQ ID NO: 826 - DNA, 335 bp, Homo sapiens
gtaatacagcaattcactgtacgatttacaatggtgcattagcaacccggcagcagtgtgatgtcagagcctcaaaaagacgtatgcaagagaagcaactgggcctggttctgctgccctggcccccagtcaaggctgcttaaatgtcaccaactccagtcctgctctgttccacagctagtcctggctgtgattttctcccaaataggacacagatattaactaaggttctgggaagaggaagcaaaagaaagagaaaaagcaaactactgaatgcactaaacatttttttaaagttttattgaaaggaaaatagaggttaacttgaaggaaac

SEQ ID NO: 827 - DNA, 241 bp, Homo sapiens
tgatgcaagatggtcctttctgagcagagctcccctcgctcagtgctcctttgtttcacgtagaagatcttcttgaggggactgtgtggccagtgcagcccaggcctccccaccctgcaccgttcaacagaagagcagctgacgcagggggccctcaacatgctcacccaaaagtcagcgagattctgcaccggcccactagccttccaattgtaaactaaaaataaaatcttggccaggc

SEQ ID NO: 828 - DNA, 419 bp, Homo sapiens
gcagagaaacagatgaaatgactcactgaggagggaagcactgggatgcctcctaacctgggacggcttcctcttctgcagcgtctgtgtttgtcagtgtctcctctggatcaggcaggcctcagacctcactaagctattccactcaactctttcttcccgtgcttcctgactccaaggtatcaggcaaacttgttgatccatttagacttcactctcaccctgcttgtctcttttcttcgcgcacaccagagctacccagaaccgcggtgatgcctttccctggcagggtcaggcctactgtggcagtgtcatgaacctttcctaagcaggatttgtgaagagggcaaaagctggcatcagcaagacatgttttggtttagacgtctcagtagacattgcagcaagttaactattgg

SEQ ID NO: 829 - DNA, 440 bp, Homo sapiens
  misc_feature (1)...(440): n = A,T,C or G
gtccttacctgaagcccaaggtgatttttggccgctggcgaccttgtgaccgttggcagtgggtcagatgtggcactcagaattaggggaaggattggtgatgccagaacatctggtgaagccggcacctcaaggcactcctcaagcctggaaagcctcaccaataggattgatccagaatatgttccagcaaaaactacagcagagtaactttgacaagaaaaatgttcacttgctacctaaggagagtctctgtctcctgacctctgaatttcgaaatcctcagctctggctgccacgcagtgggaaccgaatgagatggctgggcagggttctgcaacacagcagaaaccccaggcttcccaagacccaggatcagaactgnataatgncacttctgcctcactttggtggacnaaagatttcacaaagaatatttt

SEQ ID NO: 830 - DNA, 464 bp, Homo sapiens
acagagtctggctctgttgcccaggctgaaagtgcaatgggtgcaatcagaatttactgcagcctcgacctcctgggctcaagtgatcctcctgactcactcagcttcctaagtagctgggactactggaaaattaacctcattcagactgaggagaacagaaatactttgagaaatctcacaaaatagccatcataatgtgaagaagccgaagcagcctgtgaagaggcgctagtggaaaggaactcaggtgcccctgccctcagtcccagctgaactctcagctgacagccatcaccaacttgccagccacaggagtgagccaacttgagagtggatctttcagtcccagtggagccatctcagctgacacaccatggtaaaaagatgaaccatccttgctgatccttgccagtgctgcagatacataagcaaaataaatggttttgttggtttaagccact

SEQ ID NO: 831 - DNA, 480 bp, Homo sapiens
atcctcccatacagtggcagcctggggaggcattgccaacaattacaacagcccttctcatttgaattgaatggaaggccaaagagcatgaggtctgaagtttaggatgtgaaggagaaaagaacataacctcaaaaacccaattttaatgatatttaaaaggcctattccctccagaaatgtcaacattactcaggagtatagcaaaaaacagcctggagttttcatgatgtgaacgtgagaccaaagtcacactgaggagagattaaacttggaacatgattgccagtaaagaagataactcctgcctagaaaaagcccagctggtgacttccgttacagaattcacaaccacactgggttcacaagcccttcttcccacatggaagcccccttttcttaaatgtcccagattctctcttctttagattggatgccagtgcctcttcttcataaaaagtgctcagcttttgaaaaaaa

SEQ ID NO: 832 - DNA, 319 bp, Homo sapiens
tggagcctactgacagcaacgtgacaaaaccactctcttgtttgctttctcctggactatcctgaatggggaagagaggggtggaattacaagtaggttgcttcaattttgcataaccctggatacccccctgtgagggtgtgaggcatgtgaaagccatctgtgttggagcagaaaacaagttgagagctactgaatcagagcattcacatcaaagaatgaatgcaaactggctctcaccaccagaagccatgttcacagggagaaggagaatggacagagactctcaaataaaccacaaaacaatggtgaaaaaaac

SEQ ID NO: 833 - DNA, 249 bp, Homo sapiens
  misc_feature (1)...(249): n = A,T,C or G
gccctcctgcgcaagtaactcaccatcttcctgtgcccagctatcaccacgacacctgcaggtgagctcactgcaagcttggcgtcgtggtgctgcgcacagccctcttcagcacacagtgtcagcaccgtcctataaantctccagccagcctttgtttctttgcagtcggcatctctcatgcaggctgccctgtctccttgcaacctatttttctactttctccaataaatcagcctttttctgcct

SEQ ID NO: 834 - DNA, 428 bp, Homo sapiens
  misc_feature (1)...(428): n = A,T,C or G
gtggggnnnntaanngnctgnttgaccgcccncgtggagctctggtgattttctgaggaaaagngancttgaccgactaaaccgagagtgcctcagagagcaaatacccatcggncacgtacttctcnctttccagacgggcnctggnatgaaccctaactgttcacagactcctccacaggcccattttctatgcnattctgtggnttcctgantcttcatacccaaaaactangaagaacctccagaggggacacaccgccatnatgagagcctggctgganctggacttcnntcctctctgcaagatgaagcaccatntcgaaatgaacngcagagtccgacccccactgctggtccagcgnggatatgaggtgtggactggaatgctcttttgcattatncactggggccatgatgtgccgaaa

SEQ ID NO: 835 - DNA, 507 bp, Homo sapiens
  misc_feature (1)...(507): n = A,T,C or G
taccactaaaagtggaaaaacgattatttgaacccaggcactctggcacatgctttatgagattcatttctttgcaccctcagttaaggaaagacactaccattcaaatagacaagctacataagacagactaccgtatacactnggaatcacgagtctccaatcaagaaagngggattttgtcgtctcttttcctgttaaagaaacctgggtttaagacaagctcttgctaccttataaaaccatttggctctaaatcanattaaggaagaaaagggaagaagcctaaaggaaaatggggtcatggcaaaaaatatttccgggacaaatgggtccaccatgaatggcctggaaagaactggcttcttcattttttaacttgggggataaaaagaaggggacatttcttcccattcaaaggaagcttgcttcttggaatttgggtctatggttttcttggatgccatttttttacttaaaccgccanttaccattagggggttaaat

SEQ ID NO: 836 - DNA, 447 bp, Homo sapiens
  misc_feature (1)...(447): n = A,T,C or G
gtacacctggagtcctaagcccgggagaagagggcacagccccacttcctctggtaccagtagggccctcttcagagacagacgtgcctaggaaggtgcaggtcctcctctgctgaagatcctcacattccaggggtgcaagaggggcccctgcaaagtcagtctgctcagacctaagtcttggtgttatctacttaacaagtgaaggggctgagaggaaggtcagagtgactaacaaaaccagtcctgaggccttgacacctgaggacaggattgctgtcaataaaaatgtagctgaccttaagagtcacagcctgaaagaatctcaaaatggnctaaagtatatgggaagctttctttcttattctggtaccttaaaagagcatggcaaagagcactgtggggcagaaggaaggatctgaaaattccattctgatgagacatcta

SEQ ID NO: 837 - DNA, 453 bp, Homo sapiens
  misc_feature (1)...(453): n = A,T,C or G
gttccgtgtggctgctctgagaattctcccaccatagagagatgggtgatccctttgttctgcatgaagtcaccaatccaggcaccatggaaggactctgtgaggagggcctcccctctgagaagatgcctagccagcagggacctcatgcttgagttcagatgggttgccagacagatgaaaactccagacatgacagctcctcctctgaggctttgcctgggttcttccagccacaccagaacagcaccccacctgcaacacacaccctcacccaagccccaccagaatactgcacatcggctatgtttgtcagaatacaaaaacagagacagttttcagaaagatattctttattgtcataagttgccacgggtgggatggtcaagcgagctggcagaggctangangaaatttttgtgtccctggctggagaagtgatctgggtgtcac

SEQ ID NO: 838 - DNA, 406 bp, Homo sapiens
aggtgagtttctcagagcatctaacaggtcacccaaaaaaggaggatggaaagagacatcaagtcagaagaatggcactcacattctctctctgctggagattaaccacatgcccttctatgatgatacaactgcagatgagcagagacctttaaaatatgagctccagtccccaccttcctggccttgttgtggtataggcactacggccctgctcccctttcctgagtcaatcctagagatctggcacatccttcaggggagatctagaataattcaccttctttgacatgctattcactatgcctaggtgaactcttttccagcatgctcccttacttcagctacaatcttacttgcttctagctatgcttgcccagtcaatataaacacactttgataccat

SEQ ID NO: 839 - DNA, 116 bp, Homo sapiens
aaccaggaaccataatctcacactgggattatggactgctgtcttctatatcactgctgagccatggacggagttggacacagggcaaataaaatgccacaaagttttctaccatt

SEQ ID NO: 840 - DNA, 392 bp, Homo sapiens
  misc_feature (1)...(392): n = A,T,C or G
atccagaggaagaggagatctgactgtcatctgcacatggaacaacagaaactgattttttaagatatggtttcatctgatgcactgtatcactgcctaagacagcaatcccttgatgtgccagagattctgatgcccctgtaggtgattgctgggaacttgtttttctgtttcctcttttgggatcataattggaaaggtcctgatcacaaataatatttgatggatgggcagcattttcggcaaggacacttgcagtttctgaaatatttaatttgccgattactggggaagaaacatagaattcatggtctttgtctgtagcttctctaagatcattctctttctgngaatattctggttgaccaataaaagcaacaggttgggatggt

SEQ ID NO: 841 - DNA, 444 bp, Homo sapiens
atacagagttgaagagaagagagcaccagggatccaccaggcaactgcgttacagaaagaaagtcacgcacaggaaaagcagatttctgattctgccaccaggaagggtcaaagtctggacagcacttggtcaggagcctggcttccctttcttgaaaaacatcacatgtaaacatctaactgagagcttggtacacagcaggctctgagtgttggccccatcacgatgacaaccaagggctaattatgaaataaggaggacacaagaaaagacactatcaaggatacagtttttttaaaaaggtgggggaaagttcatctttttttaaaaaagcatccatagacttaaaatttttttgtttggggtctgtaaaaaaatagcaatatgggtgaaacgctatgataaaaaattgcccaaattcttgttatgttaaaatggtactg

SEQ ID NO: 842 - DNA, 300 bp, Homo sapiens
gttcaggaaataactcaccagaaaatgatatctgagcaaagacctaaagaagaagcagcgagctatggggatatgtgcaggaagagtattccagacagagggagcctcggtgaaagaccctgtggtgggagcatcctggcttgctcatggggcatcaaggaggccagtccacctgcagcagagtcaggacagggctttggctttgtacaagcttaattaagacaaagaaacagtaaaacacccagaataaaacactttataatctggagatcattaataaaactaaatacggatttaaat

SEQ ID NO: 843 - DNA, 214 bp, Homo sapiens
ggatcagttctttgctctttgaaacgaagatgatccgtctcacactgaaagtttcctatcgtgaggttcagtgtcatctagagtcaacggatgaagtataagtgttcactgtggaatttctacaacacaaaaagaagaggctggataaagaagataaactgaatattgaaactgttccttttccattaaaaaatagcaaaaaagttttccctgt

SEQ ID NO: 844 - DNA, 422 bp, Homo sapiens
gcaagcagaaccctggaatggcttcctcagaccctgtcctgctcagacttcacttcctgtcactctcccgttgttcactgtgctccagacatgccactgacttgctggtccagtagcctccagtcttcatagagaaaactggagaggctgtcctaacttcacctcagcattggccgtggcagcgagggcctgccctgtgtcttgtgcgtgctcaccaccctttcctctgtacctctgcatggcgcataaacactaggcacagagacttgaaaatcatccatctttccaaacctcaccgaattcacaactggccagcactagagaggaccctgacctcatggctgcacagtcactggggggtgcagacagtaaatccgggatcactggacaagtcacactgcaacaagtgctatgggaatgca

SEQ ID NO: 845 - DNA, 463 bp, Homo sapiens
  misc_feature (1)...(463): n = A,T,C or G
tcccaactgnggcactggangtanagcagcaatgaagacagatgtagtcctggcattcctcaagcttatagtctaataggaacgtctacactgagaaagaaaaaaaagaaaagaaggaagaaaagaagaaacccttctctgacacttcatagacaaaaaacaagaggagatgattatttaagttcatcagtgggagtggcacctgccctgtcctactctggttactagggaagtaacagactccttggaaaaaacaacgttgagatggagagggaaggggtgaaactgggaaatgctaaatctgaattcagagtatctggcctcatcattcagatattttaagggataaagggaagttgncgggnggaaatctgaaggngaattaaataattggaagttatgatgaattgccattccatctgngtattgcctttaatctctggtctggctcttctacctgcca

SEQ ID NO: 846 - DNA, 230 bp, Homo sapiens
gtgatgtaatgaggactcatatatatgcacatggagtgaataaatgaattaaggaatggatgggtgaaaacaacgaactgtgaatggtccagccatcaccaataagacacgtaacaacttttcccacctcgcttcacgctgccaggcaacgcaggctggcattgttgtagtgagttgcttctgttcctcacaagccaggatttaataacagaataaaggaatgaactcgc

SEQ ID NO: 847 - DNA, 391 bp, Homo sapiens
  misc_feature (1)...(391): n = A,T,C or G
gcttgccctttggaagcagccaccaggctgtgaggaagtccaggccacatggaaagaccacatgtagatattctgaccaacaggcctggttaacgtctcagatgtcatgtgagtgagtgagcaaccatatccctctagcacccagccttcgagtcttccagctgagatcccaggcattgtggagcacagaagcgtcattccccctttgctctgtccaagttcctgatccacataatccatgagcatactaaacgattgttgtataccactgagtttgggggtaatttgctacacagtaataaacaattggaacaaaaaaaaaaaggccagngnggccaattcaanttgganttnaccnnggtngacttngttnaaagggggggacttccca

SEQ ID NO: 848 - DNA, 442 bp, Homo sapiens
  misc_feature (1)...(442): n = A,T,C or G
agagaagagggtgtttccaagggaaagcttcagaagcccaagcccagctaactttctgggaagccctgatgatacccccaggaacgcagcaactgcaaatcaaacctcatcaaaatggcaccagctgaccctcctctccacccagggtttctcaacacccctggcaggatgcgaggggatgaggagtcctcgggcttggacccccgaactgtggtcatcatttcatcagatgccagctgtgtagcaacaagagttgctatggaaaacaaccactacagcaacagactgaaatcactccaaaaaaggagccgncactcattccaccaacataccactggggacgcgggaaagcaaaacccttgggttaagaacaacattcccactcccctccccagtttccatcctagtaaaaattctcgtgcttgtttgcatttttaagttc

SEQ ID NO: 849 - DNA, 106 bp, Homo sapiens
  misc_feature (1)...(106): n = A,T,C or G
gtgangacacancaagaggcaccaccttggaagcagacagctttcanagaggagnngacaccttgatcttggacgtccctgcctncagaactgtgagaaataaatt

SEQ ID NO: 850 - DNA, 438 bp, Homo sapiens
  misc_feature (1)...(438): n = A,T,C or G
ctaaacaagcactggcctcaagagaagcaatattaaaacaatttgcagctcaccaccagccgctgactaacggcgcccccctgttccaacagccccanctacngctntgattggacaagaggctgatttcagttancttcctcctgatgagaaaaccacagccatggactgattctggccgntttacanaggntgngnacttggntgcctttgagtcctaaaaaggaggtgtagggcctaattgtaatacatgtaaatgttaattctncaccccaaagcacacatggttatatnacacccagccgtgttanatgnacacatgcctcaagaccaccttcatgagtatttgaagctcttcgnataacctgttgactatngtatgttttggccaacctgttcaactaaaaatttctgtntaattncctctctccctcaaaa

SEQ ID NO: 851 - DNA, 224 bp, Homo sapiens
gaaatgaaggatttcttattctgaggaagggagagacgccgaggaagacaggacttgaggttttactaccttcgttattcgaactcccctctaacttgttcctgtactagaaacccactcactatggagaaggaaggagaggggctgaactgatggacaaacgttgtaaataataggttttatgtaatccacatataaataaattaatcgcctgactcgctccg

SEQ ID NO: 852 - DNA, 458 bp, Homo sapiens
  misc_feature (1)...(458): n = A,T,C or G
ncacanntgagatcttggctgnttatgaancanggaacaagcnccgnttttnagaagcaagctcaagagatgatgaatgaaggaaggtggagctccgaagaccatgaagaactgctacagaagaaaacaagctttcaataaaataaaagagacatcaatcacacattttacccatttatgaaacatgctcaggacaaggtactcagacgtgaagaagcattcccaggaaccatcttggagaactggacttggtaacatgagagctgggaagtcccaattcttggtcatgaagagtctaccacgaagagaattggtttggaaaccagaaggctaacttttacatgaggcaccagggcttatgccccccagattttcagagaaggacaataatggggtatttctggatgttgaaatcctaggattgatctgacagcacaaaccaaatgccagcagtttcc

SEQ ID NO: 853 - DNA, 438 bp, Homo sapiens
  misc_feature (1)...(438): n = A,T,C or G
atgtttgcatcctgatgaactgacaccacttggacccatgactcataccaaggaaataaatcaactggtcctgtaactcccacccagaagctgactcggcatgcgaagacagttccaacactcctgtgatttcatctccaaccaatcagtagcacccattccccagccccctgcctgtcaaattatcctttaaaaaccctaccctctgagttctcagagaggtggatttgagaaatatctcccatctttttttcttttacaactggcaaatatagatgagtctgtagccataccagacccatgtggcccaactttcacgtaacaaaagtaagtacagngntttttaagttgccatnggaccctcaaggtcatgtaatctgagcatgcccagatggaccaagtgttcaaccacagagggaacctgattgctctgactca

SEQ ID NO: 854 - DNA, 160 bp, Homo sapiens
ttttattcacagatgaccagaccaccagagagacctatcgaagtctacatttcaaagaactttgcctcaccttggttgataataggaggaactacagcaagagggtaaaaatttgttagaataatcttgataatggataaatctacatctgctatatccc

SEQ ID NO: 855 - DNA, 138 bp, Homo sapiens
  misc_feature (1)...(138): n = A,T,C or G
ctacctgcattaagtcancaactgaggaaccaggnaaccataattctcanactagggnattatggacttgctgtctntnatancactgctaganccatgggcggagntggatacagggnataataaaatgccacaaag

SEQ ID NO: 856 - DNA, 436 bp, Homo sapiens
  misc_feature (1)...(436): n = A,T,C or G
gtggggtctttcagtgcctgttttcccgcccacgtggagctctcatcatttcctgagtaaaagtgaacttcccgactcagccgcaagtgcctcgagagcagagacccatcgtccacgtccttctcactttccagacaggcactggcatcaacgctaactgttcacagactcctccacaggcccattttctatgcgattctgttgtttcctgaatcctcaaacccaaagactaaatgaacctccagaggggaccaggccagagagagcctggctggagctggacttctctcctctctgcagatgaagcagcggccgaaatgaaatgcagagtcgacccccanctggttgttccaggggggatatcaggggcatctgtttctttcttttgcattctcagnggataccatgttgcacgaaatctgtggctgcttttgtt

SEQ ID NO: 857 - DNA, 442 bp, Homo sapiens
  misc_feature (1)...(442): n = A,T,C or G
tgtgtacangcaaatttctgttgtgcctgggaagaaggaaatttgagttaaagaggaggcccgctccatatgccttgtcacaagtacactcactgaaacattaattcacgaagagattgcaacaagaccaaaacgaaagaggaacagggcctgacaatgttcagagaaggaaagccgaagaagtaaccatccccaagttaaaaatgacgtggggatgaaaaaataggttgcctgttgtatttgtcattgaaatgcacaatcttgtttactgtttatcttgagactctgggagctctcctgctgcttaggaaaaaagaggcaaaggnttangaagaaatgcttggccttannaaagagaggcnttagaaaccctagagagaatgggaggngtaaatagtatgtgggcatttggcaatcaccacaaagaaatgggagacaaaaa

SEQ ID NO: 858 - DNA, 443 bp, Homo sapiens
  misc_feature (1)...(443): n = A,T,C or G
ttcctccagcataaaaacaagacaaagttcctgcagagctgctctaacccaataataaaattggacaataagctgcatatctgccggaaacctgggactggcaatggagatgagaagagaatcagaagggatatgtctgatgacatagaagctgtggaatccattcttcagggtctaaactcaagcctggtccttagttctccgtactgtattcttcctgacctccagacctgagcgtcctccccttcaaaagacaaagccatccaaagagtctgagcactccaagtgagcagcttgaagagtgagagacgtggacagagggaagggcaggtctgngcaacctgngggccttaaaccccacctntggccttntccagngaagccacactcangatttaagagaacttgtgatcaacttggggtatttgcaccccacgaaaaga

SEQ ID NO: 859 - DNA, 312 bp, Homo sapiens
gctgggagattaatgctgtcctcaaagtgaagagtcaccactacttgtcaagtcatgtcatctctgcagccacgtgcattttgtaagctgggaagaataaacagacatttctgacatttttgcttgagatttaacctcagcgcgtcaagagatagagaggggaacagaaataaataaaatgtggctaaataaggactgtttatcacaaacacaaggcagagatctggtgaccatatctgactttgaaatctgtgtctccaggaagaggaacatcacacaccagggcctgatgtggggtggggggagggggga

SEQ ID NO: 860 - DNA, 418 bp, Homo sapiens
  misc_feature (1)...(418): n = A,T,C or G
tgtctcagatttcaggagaactgtgacccatgcagggggtttgagtcccagtgaaagtggagaccctgtcatcctgagaatcgtccccagggggaaaccatctttttctaaggcggaatttctcaacggtggaactactgacattttggaccagtgttcatggaagcctgtgttgagagagccacagagcaaagtatctgggaccactgagtcaccatatggaggagagctacctggaacattcagggtggacttcgtataagtgagaggtcaacagatgtcctctctgttcctggtcaccgtgctaggtgtggaggacacagagagggagaagacctttntngctttttgggagctancaagccggtagaaaacttntaagcaggaaagtaaaatgatcagggttttaaaactcaat

SEQ ID NO: 861 - DNA, 262 bp, Homo sapiens
ggttgttagtggacatcatccgagcaaaacttgaaaagtgcttatatgactgggcttacctgtacatgttcctgcttttacatgagaggcacatgcctccaatataaccactggtccaagaaagataggaaatacatggagaaaacctggtttctatctgaagtttggagccaccccaacaaaaaaaagcctgaagaaggggcactccaagccactcaaaaacacatgagcaagaaataaatgcctattgctgatgccactg

SEQ ID NO: 862 - DNA, 298 bp, Homo sapiens
gacaccacgaggcgaaggaaggaagagcgagcagatgtgagctcctaagcacggccgtctccacccactgctgcactcctcagccttcccagacacagcctggtttttcctactgcacatggcactttcatgaaaggccgcctgttctcacatctatctcctgaaactcctttaggagtggagacaaacgggcacaagtaacttgagttgtaaagttcaggaaaatttagataagtgcttgatcataacacatcagctggtttaatggaccatcttcgcataaaacacttcatccttg

SEQ ID NO: 863 - DNA, 156 bp, Homo sapiens
gtctgaggtgaaaccagataatttgctgaacatctaagaagcttttaggaaactacacttcggaggagagtgctgtgcattggaaaattggaaacatctcaaatattacatgaggcttttgcaggcgggattaccacgcagcttcctgctcctgcc

SEQ ID NO: 864 - DNA, 12 bp, Homo sapiens
attcttgccaag

SEQ ID NO: 865 - DNA, 180 bp, Homo sapiens
gtgcttcctgtattaacatccttgcaagtggtacctgcctctctgaggatccagctacgcaatgaatctgagaaagcttaaaatcggaaatgctgctctagtaatggttctcaaaccctggtggtcttgacatacaggtcttattaaaacacagttgctgggctccacctaaaaaaaaac

SEQ ID NO: 866 - DNA, 182 bp, Homo sapiens
gatctgggttggaactgctctgcaaagataagtggaagaaactgtttatttgtaagagaaagaatgatgatggcagaaaaaggagagctgaatgcagtcactaagaaaattttgcaccctgagactccgtaccacgatcctgtaacattagcaattatgaaaattattaaatggttgatatg

SEQ ID NO: 867 - DNA, 457 bp, Homo sapiens
ggatttgcgtactctattatgaatttctctttgagaaataatacctgtgagaatgctgctccttcaattaggttcaggattggaggaaaaatcatataaaatagttggtaatctttcttctctagaaagtggcaacgatatatagtactgttgaaccatgcctgccagtgtcaattcctgaaatggcaaaagaaaagggaagaagagaagataatgctataatgatcagctcccaaacctctacttaaagcataaatggagaaaagaaagctcggtgtagtgctacggaacactattcggcattaagcagagtaaatagcttagtcaacagtgtgggccattgtcagtctttatttgtcatctctcactgagtgatcacaactcagcctcttatgtgtcctggaagtgtccaatctccaagttaactatttattaagaggagatgcatcttaaaagg

SEQ ID NO: 868 - DNA, 259 bp, Homo sapiens
gaactccgggtgaggacgacaagagctgagctcgggtgcttgccttctgcactctcgggaggaggcaccagcatgggcacccttcacagttcgggcccctcactcacaaacgtctggcacatggaaacaagctggcaaaaagattgtttttttcttccgtactttttgttataagcctgtggtgaagtgtccatatctggcataaatgaatgtgagtggtcttgggaatctaaatataacatgtttctaagttacacac

SEQ ID NO: 869 - DNA, 436 bp, Homo sapiens
gaaggaggctgccctgcctggagtgaagagtgcatggagcagtctcagccgacccaggtgggatgcgtaacatggccgagaaatccacccatgctgctgagagctactgcgccatggggtcatgtgtcacctaactgacttagcccagcctgactgatcccccgtgtgtgaccagacatcagcacattcagaggacctcatactgggaattggtggacctttcagaatggacatgaccactcaaagtagggacattactcgctatttgatggcccatgtgggatcaaaggccactggggttccctcaaggcacagcacacttagaatcccataagtcctcagttctaaggcatgtatttttcatacttttgataattctgaaatcaaagtatagctttctagtagatattaaaactcattttcagaatcctgcaga

SEQ ID NO: 870 - DNA, 458 bp, Homo sapiens
gcctgggatgacctctgcctgttttcaaccattattgatgcgcaatttatgagaggatgatgtggcaaaatgatttgaaaattggaagtgatttactgcacaacttaaatattttgtcttatcattacagcaactctataagtaattaattctggcaccatattttacaaagaactttgacaaattggagcccatccagaggagaacaaacaatcttgtgaagggtctggaaaccacaacttgtaaggaatgatggaaagagctgaggatgtttaccttggaagagacacattttaagaggaacatgatagcttttttaaaaacactgaaaagaactgtctggtggaagagagatttgatttattcaatgttactctggagtatacatttaaagccaaagagtaaaagttaaatcttaaattctctatgatctaataaccaaactttcccaaaccaac

SEQ ID NO: 871 - DNA, 450 bp, Homo sapiens
  misc_feature (1)...(450): n = A,T,C or G
ccttgagacaagaactcaacctggtcaataccttgatgtcctgaggcttatgatatcctgagaagaaaatccagccacaccaggacaggcctctgacccacacaactgtgagctcatgaatgggtgttgttttcacagctcagtcagtgctgttttgttacagagcaacaggaaacgaataccccctccacgcagatctttttctagagcaattaattatgcatacggaacggatgaaatgtgctaagggaccagtgaagaagctgacggtgtcctcaggatgaaatagagagggaaagaaatgctattcattccacaaacatttccacccccanggaaggccctccttcctgcatntagccacgattcaaggaaaggtgaactcacaggaaaaggagactaaagttctgatagaggaacttttaccataggctaccagccattctttcc

SEQ ID NO: 872 - DNA, 426 bp, Homo sapiens
aaacctgagaggaagcagaacatgaaagcaagaaatctgagagcaaatgcagcctttagatgagcttgaacacagaagagaggcgatcagaggagaagatcaaaggctggggaaggaggctcacaaggacttcccacaccagctgacagtctgtgcagagcaggcctgtgcttcctccctcagaaggcagggctctagcagaatattaggaataaggcatttctctcttaatacagaagaatgaacagtgtcatgtgtgttggtaattggtaattgctagattgataaataaatagggcatccaaattcatttctttaattcttaccctaatttttgcatcttccatttataaaatattttaatcatgttttatatctaagcttatatgtttttgatattactatcaaaaaataatttaattagcc

SEQ ID NO: 873 - DNA, 321 bp, Homo sapiens
ggtctcactcttgtcacccaggctggagtgcagtggcgcaacctcagctcactgcagccttgacttcccaggctcagacacagactcagaaacttgagacaacgttgcccaagatcattccacactgagaaaaaaacacattagaggcagcagtgttttgaataggtgcatggctagtgttaaataatggaaagaaattggaacaagaggcaagttgtgaagtaaaagtcacaccctggtatgaaaacctgttgtcactgtagcgaaacttgctaattacagaccggctccatcagtagcttcacaatgcacaaaatcacc

SEQ ID NO: 874 - DNA, 371 bp, Homo sapiens
  misc_feature (1)...(371): n = A,T,C or G
aaattcctctttttccctgaagaaagctgcctcactgaaggacactccaccttcccaagggcagcctacaatggtgtccatgctgagcacacctcctggtgaacctatgcactcaaatctctgtccagcacctgcttcctggggaatcaaccgaacagatgatgccaggagtagtctgagaaagaagatgctaagatgggatctgaggctgccagctgaccactgacaggcaatgagatccccgttaccgttggtacaccgagctgataaagcccctgacacaagatggtgatgaaactggcaaaacttccaatgggggttaaaatggangggnntacagggggaaggaaatngnntttggggtaaaaata

SEQ ID NO: 875 - DNA, 433 bp, Homo sapiens
cacctgagcaacacagacggtgtccttgtgagagaaacaagcagcttgtgccctcagagcaggaagacaaagagtaaagcctttatcccactgtttggacacacagtgactccatctcattgaagcctaggtgatgcacttaatcacggtccaggatccaccagctatgcaggctcgggctagaaaacagattgcttcacaccatccagagctcttcagcagcctcacattgcagtcaggctgcaactggacagatggcatgcagggctcagatgtggcacagttgggaagcatctgggtcccactcaggatacaacattgaaaacatcagccacgccctgctggatgagccagggtctgatgaacggggacttgctcagcctacaggtgtcccccagccatcttttcttcaccagcacaaaagcttcactcg

SEQ ID NO: 876 - DNA, 328 bp, Homo sapiens
gttcgtggtctcgggggcttacatgaatgaagcttcgcagaccttcgcgattggccttcttctctttctctacaggcagcaaagaatatgccatctacagccttgcttagcaacctcaggagaaagggagctcttctttctctagagtccatagtgcaatcccagagaagcgttgattagctgtgctagggctccatgcccatccctgtatccagagggacatgttctacaacttcgtgcaaattaaaaacaacacatttttgaggaggacagtagagtatgctgggcaaactaaataaataaaaataaataaaccaaagtccactgc

SEQ ID NO: 877 - DNA, 404 bp, Homo sapiens
acaccaaccaaatgctgtctttgaatgtacctactgacattctcaccagaaatatagaaatcatctgttttcccacaaccactccaaaaagactctacacatactggatttaccactgttcagggaaaaagcaagatcatctcagcatgtggagcaagacctgtgatgccatcttcttggaccatctcattttttagtttacttttcgccatttttatagagaaaacctgagttggctagtggcagaatggttggagctgataactgcaaagagtacatgtgaaatgctaatatccatgcctctgaaacaggatcattacacagagggttggggaactccagttattaagtatatgtaactcccattccttaataatgatatttttaataaactcttttttctg

SEQ ID NO: 878 - DNA, 450 bp, Homo sapiens
gtggatgatcaagagccctcatctggaattagacctatcttgcttgttcagatccctgaaggagaaaagaactgctggtatcccaacctcaacgcagcaagtttattttatgtgttttacatgatgtcctgatccaaaagctggttttttaacaacaagattcacaagacgaaaaaatattttaaaaatatggattgactgcttggagaaaatttaaaatcttttgagcagcactgactttgaagtggaaggatataagcagtgggagctgaagttattcagatacacagagcaaggccttcggacgagagctttgatgagtcctgaagcaactgaagtcatgaatacgcataagctataacttacaaggcaagctatttgggacagaagataaggcatccacttcttaggaaaaatgagctacgcgctctacggtgtctggggtcacat

SEQ ID NO: 879 - DNA, 458 bp, Homo sapiens
  misc_feature (1)...(458): n = A,T,C or G
ctatcctactttggagaagacgctggaaattcagagtttctgccagagaatatatgcctgaactaaaagaggaagtggcctataggagaaaatgaaatatgattgtcccttcagtgggacatcatttgtggtcttctctctctttttgatctgtgcaatggctggagatgtagtctacgctgacatcaaaactgttcggacttccccgttagaactcgcgtttccacttcagagatctgtttctttcaacttttctactgtccataaatcatgtcctgccaaagactggaaggtgcataagggaaaatgttactggattgctgaaactaagaaatcttggaacaaaagtcaaaatgactgggccataaacaattcatatctcatggngattcaagacattactgctatggtgagatttaacatttagaggtgacagcatcccccacactggcagtgtc

SEQ ID NO: 880 - DNA, 274 bp, Homo sapiens
aatgaccccacctggactcctgcctcaagacttaacatcctgtggccctatgcagaggcagactcatcacaccaggactgtttttcacactccaatcattttttttccctgaccaatcaacattccccattccctagtcccccacccatcaaactatccttgaaaaccctaaactccaagcctttggggaaatacatcaatttgaataataactctgtctcatgcatggcatggccagcctcctgtcaattaaactcttcctttactgcaatgt

SEQ ID NO: 881 - DNA, 265 bp, Homo sapiens
ataaatatgtactcaaagcaggtggctcaatccacttatcagcatttggcataccagggttcaatgggtaatcacaaagaagaacggggcagagctagagaacagagagaacgctttttgtgactcaagtgtgcagaaggtaatcaactcttcctaaggatcagatgatgccacttggccctacaatgtgatatcttcagtttcctacattcagtaaaacttttcaagactcagcctcatataatagaatgttactcaacatttg

SEQ ID NO: 882 - DNA, 278 bp, Homo sapiens
tctctgcaccctacaatacaccaactggcagttccatcatttgaaagaaaatcttcaaggtaaagacatttacaatgacacaaaaacctttcaaaggcatcatggtcctaaagggctttccccaagggacagcacagtgtgttccaggccctgacaagaggtttaagacctgtgacacagactgaagctctcctggcatactctgaagctctcctggcaccctcccctttatgcttcacaggtgtttctcctaataaatttcttgtatgtctcatccc

SEQ ID NO: 883 - DNA, 312 bp, Homo sapiens
gttttcccgaggatgactctggctgccctgacagccccaccacaggggacagcagcatttatttgacttgactaggattggaacttccagtgatctacaatctccatatgatctctgtttctacaaggaagcaccttctccatgaatattatgcacttagttaaactgagccatggaaagccaatcattcattcaacaaatatgtacagagtgtcaataatgtaccaggcaagaaacaaggagctgcgctctttcttcaaggaatccatagttctatcagtagaaggaataaaatattctaagtgtctttgt

SEQ ID NO: 884 - DNA, 123 bp, Homo sapiens
ctgtatcaaatctggattgcaagctggccttctgattgaagacgtcaggaatgacacacaacagcctaccatcctcatttccactgctctgctgaccagcctaaataaataactttaattttg

SEQ ID NO: 885 - DNA, 450 bp, Homo sapiens
ctcaaaatcacctgtgatatctgcagctggctttgcagagcttgtagatttgggctgttgaccaagacagaagggaaatcagggatcgtgtctgcagccgaagaaagaagatgcaggcgatagaggaggtggagaaggagtagctgccccctctttcctacctgatcatcagaggggaagaagccaagactcaaggagttaagaacttttccaagggtagctattagccaggactcaaacctacatacttgaatgaatttctacaacctgttattgaagactaaggaggcttctcagcctgggctggatcctggacagacaggcccaggcaggctgtgcactgtgacctggggccttgcttgtgaacaaagaggacttcaagaggagatggcctggaggagttcgcctttgtggtcattttgcttcagtccgtgacaacctggcttctgc

SEQ ID NO: 886 - DNA, 478 bp, Homo sapiens
  misc_feature (1)...(478): n = A,T,C or G
agcgtaagatcttcaaggactgtgtgttgttcatctttggactgtgtgaccaccccacccccatgctgaacactgtacctggcttagtaagttttgctaaattcatggatgaatgaatgaaatgtgaagaagctccggatgatgccaagttgcaagggaaagccaagaactgaggggaacttttgggaggcatgaaatggaagaccaaaaaagccactctgcctccatgtactcttcgaactttccaanaataccatgctcttcttgaggacttttgcnccaanacaggtntttctttananngggcncgggggccaatcctggnnaatttcttgggccttggggttgnaaaaaagncctnccttgggaagccggccccaaaaaancttccggttggggaangggaaatnccctttttnccaaaggggtgggccgggacncctttcctttnggggggaattttttttccctaaaaccc

SEQ ID NO: 887 - DNA, 616 bp, Homo sapiens
  misc_feature (1)...(616): n = A,T,C or G
tccttcctctctgaagccaggatgaaataacgttgcgatgtaatacaacaaaccatatacttccaagttgaaatgacagtaaaatggtgtgatcttggctcactgcagccttcacctcctggactcaagcaatcctctcacctcaggctcctgacacaccagttgcacattcaggtgaaaattcaggaagaaaagaagccgtctacatcgcggtggatgccttggcttatgaaaactttgtgggttcttggtctcgctgacttcaagaatgaagccgtggaccttcacggctggctgagattttatatacacaaccacagctgtagaccgggatatttactgcagtgccgtctgagatgttaaaagaatataccaagccctattaattattcagaatataggagtgatgtccttcttctcaaagcacatatagttcacatccccaggcttaaattattattattgctatgntggagctgggtttaaaagttcgtgaggagtgattggtaaaatttcangaattgngcaagncagttggtaacacaacccttatgtaattatagaaacttacaattaaataaattatggtaaaaaccaangcataaatctctaactc

SEQ ID NO: 888 - DNA, 427 bp, Homo sapiens
  misc_feature (1)...(427): n = A,T,C or G
gcttgaacccagtgctgaccccctcccaagaacttcttgttcttgcttccagaggattggaactgttccaggggtagcacttagagagcaggacatgcccataagcttgaggaaggtactgcttacaagaaatgagtcacagcaactccattgcttccaacaacaaagtggatgaaaaacactcaagccccactaaacaatactcggagttttgctgcgacagactggttagactatttggacactaccatgaagactatatccaccattctgccttcaaaggaggagactgcagagagaaaaggggaagaggaacaggaggaaaaagggggaggggaggaagtggaggaggggaanaangncntnntnnangaaganatntnnntttattgccatanaaatgacngnnngaatccattttttcctg

SEQ ID NO: 889 - DNA, 572 bp, Homo sapiens
atttaccgtgaagatgctgacatgtgttagaaacagaaaatccagctcatgtggtttagacggagacgtctctcatagcaggaaattccaggtgagggcagcaggattttggtgaattgcctggttgtgccaccaaggactcctgctcttctcatcttcccaggcggccaccccagggtgaagatgctcttccggccaccttctcttataagtgcaaagggctgcggagcaccaggcattgcatccagacagggaatgcaacattcaccagggaaaaaggagcatttcctctttatgttcctgtaggagtgagaaaacctttgccagacaacccccagcaggcttcctgttgggactcattgacttgagcttgtttgaagccaattgttggaaagagaaatggagttaccaagattttctcaagagacagagtttacccttagccacacaaagtggatacctgaaccagcaaggatagagagggcatggctgctgcattgtcaaccaacagtattcacaacagaatgaaaaacaattcacatttactactgaataaagcagacactcctgac

SEQ ID NO: 890 - DNA, 622 bp, Homo sapiens
  misc_feature (1)...(622): n = A,T,C or G
acaaagacagtcacagagttaacatgttttctgaggtcataccactaaaagtggaaaaacgattatttgaacccaggcactctggcacatgctttatgagattcatttctttgcaccctcagttaaggaaagacactaccattcaaatagacaagctacataagacagactacgtatacactggaatcagagtctccaatcagaaagggattttgtgtctcttttcctgttaagaacctggtttagacagctctgctacctataaacatttgctctaatcaattagagaaggagagcctaagaaatggtcatgcaaaatattcggacaatgtcacatgatgcctgaagactgctctcattttaactgggataaagaggacatttctccattcaagagctgcttctgattgntctatgtttctgatgcatttttactgacgcaatacatagggtaataagatactcatgttacagacacattatgtaataagtctgnatcggttatatccttatttggtttcangaaaatcaaggtttatttttacttctgngaaacaatgncatttcaacttatttatacatattcctttatcaaggaaataattttatcctggatatcccc

SEQ ID NO: 891 - DNA, 235 bp, Homo sapiens
  misc_feature (1)...(235): n = A,T,C or G
gcctccccttaaaatgtcatcttggaggaatggtatggcctgaaccccagcccgagtcgtcttccacagcgccatcctgctttgctttcttcccagcacgtacctttggaatgatccgatttctcactaactgtcctggcccccttgaatggatggcccagagagacaaggcctccttcacagcggatgctcagaatttaactaaatgatttaacgantaaatttaggtaaaact

SEQ ID NO: 892 - DNA, 231 bp, Homo sapiens
caagactgcctttctggccctcgttccttcttcctgtctgggactctagtgaacatcatctacgaaaggttctgatcagaaaaggcattttcagagctgacactggctgttgaaagaaaagaataaaaagcttgagactttcagcatcctggagaaagaatatgcttcatctacgcacctcacacatatctgacttgaaatcagattaataaatataatacttccacaagc

SEQ ID NO: 893 - DNA, 213 bp, Homo sapiens
atccagtaaagactgcgcgtctgacacctttaaaagtctcaaaaggaaacatttaccatctgttctttctgagggaggcttcatctatataacaagaagaccacctttgctagccaagccaccttttttcccccttcccacaaactgttttaccagaatccaagcccccattctttctgtaacctctaaatggtatataaatttctgtaactc

SEQ ID NO: 894 - DNA, 138 bp, Homo sapiens
gacgttctctgcaggcgaatagtttctgcattacaggatcttctgcaaaggcccatcaactcgtcaatggacagcaccaacagtttgcactctaaaattttttgaatgcctctcattaaaatcctcctcttgctgctt

SEQ ID NO: 895 - DNA, 219 bp, Homo sapiens
gtttatgctacaagttactccagttctaaactgaatggaaaatggaaccaggtgatgtatccatgtgaaaagagacccaccactggggatgagtgagctagtgaaacgctgctgcagaatgaggtacggctgagacagcggtgaaccatggacaggagggaggtacacgtgaatagacgtttatgtgttttatgctaaaataaaatgtataatgattgc

SEQ ID NO: 896 - DNA, 453 bp, Homo sapiens
ttctcttgtagctagtatgccaaaacttttaagagaccatgtgcaaccctccagagccctatttgttggctacaaggacctggaagccacatgtggagatggtggaatcacaggctaaagagtagtcttcattggaagtcacctttgaaaacagaacgtcacttttgtttagcactgcaatactcttcaccactctccacttgggttctccctgttttgcacactgtaagaaaatgaattaaccaattaattagccccctgtggctgagttcttaaactctagaaggggtacagagagatcctacctaccctatggatggcagaaatggcagctgacatgagtttcacttcctcatttataaaatagaggatactaacaggcccatcttcaaaggctgttgtaaagattaaatgagttaatatatgcaaataaactggaacagtgcccatgac

SEQ ID NO: 897 - DNA, 184 bp, Homo sapiens
ggttgcgggagcctacgaaggagaggggctgagccttataaaaacttgggcacataatctgtctaatcactttgaagatgaaaagttgctgtgaaatgccaaccgagctgatgggaccagggctggagcagagatgaagagacacagcagggccaattgtgcaaaaataaaatgcatatttttt

SEQ ID NO: 898 - DNA, 90 bp, Homo sapiens
caaaactccagtctgtcatcacctctgacatgcgccaagagctaccaggaatgatgaagtatatttcaaataaactttcctattaaagag

SEQ ID NO: 899 - DNA, 452 bp, Homo sapiens
agacccacgtattgagggactgaagtttcagcagcacatgggtgaccttcgaaatggatcctccatcaccttcagatgactgcagccctggatcacaacttcaccacaaccttgagagtgaccctcaccttgaacctcccagccaagctgttctcagaaggccagctaacttccaaaattacccaaggattcatcatatcaaggggcaaatggcttcctgtttctctctgtgtcctctcagggcattagtgtctggccctctctcaaggtacctgaatgctgggagcctgaatctgacaatgcccattgcacctcacaaatcagcttgagacaatgcttacatatgttccccctgcttcatatgtctcggttatacttgagtgacgctcatatacttttaccccattttgtatctctcagttatacttgaataacgctcatatacttttccc

SEQ ID NO: 900 - DNA, 636 bp, Homo sapiens
  misc_feature (1)...(636): n = A,T,C or G
gaatggaaactagggctcagaggtttcacttgccagaagtcactcggtccctgggaaggatgcaaaccagctcacctggctctccagcacatgcaccccagaccacccccaaggatgtgacccattccttctgtggagtctgatcttccaaactttagacaacagctccttctgcaagctttcgagcctgcaagctaaggacatgaatgaactgagtcatccccacagagcttcattaattttaaggcaatttaagatttctgagtcataggtttcagtcatttagattttcccagctggtactgtacttgcccacacacacttttctttaaagattgcatctgtctagatgtgtggttctgcccacccttcctcagtttctgagaagaaactcgccctcgtggagtgctacatgcagggctaagccatttccatttgccacgtgcattagagtctttgcctgagggattaatgggattagcagtctgcagcttgatctagactctatccaccagagacatgcacaattccaaattctatatccaacacaatattttacccagtcttcccagaaaattcagttatgccatatggngactccactcctgaataatatttaagcaacttgatgaacaa

SEQ ID NO: 901 - DNA, 477 bp, Homo sapiens
agcagtaggactcaacgctgaaagagaagaggcgggaagctaagaacacaaagagaagccatgcagggattcacaaaaacagcaggcagccagtgttgctgatggaatgttggaggaagctgtcttgttcagcaatacaggaaaaatgactgcagtgaaagaaaatggaacaagtgcatacattgacaagaaagatatggattcctatacacaaagacttccccttgccagatggcaggggtggcatttgcagatgatgggcagaggggctggccctcccacattaggtcagattggctaacagtcattccctggcaggaaggttcccaaccctgggtgcattgcaccatcatccgtgaaagatcattttattttaaaatcagattcttggttacaccctagccctacataattaggatctctggggattatatcctgccatttcacaaatattaaatgccattatgctgccttttg

SEQ ID NO: 902 - DNA, 294 bp, Homo sapiens
aagacaatgggatggatatttggatcagagtatgagttgtggatgaagagggaaaatttctcctactggcactgtgatgactagtgcaaacctacgctatctacaatgccttccctgtcttgcggctcattctttctgaagccagaacacttagagtgggtggggatagtagggagaaccaccatgctgcaatagcaaaccagctccagagaagggtcttcaaggggtgctaataatactttctgacaatgaatcttcactgtggggatataaattatatgcatcctaaacttg

SEQ ID NO: 903 - DNA, 433 bp, Homo sapiens
gacattcctacattgattgtcaaggtgttgaaatttccaccatgtagttttttctccacactcacagagaggctcacggtaaacctcctagagcatcttattaaaagagaaacgctacagccatagtcacagatgagctctggtgactaaaatcccacctaccactacttgactgttgcggtccctgaagcctacaaaatcgcagaatgattgctggttctcaaacctctaggttactttatgattgggaattttacatatatccattgcctgaaatgcccttagcatctattaccctttgagacttagcttcaatatcaagtaatgaagcctttcttaagtacctagagaaaatcagttttccggtctctcatgctacctttgtacgcacagctttctgttgttaccttttcaaatcaatcatttcaccatt

SEQ ID NO: 904 - DNA, 437 bp, Homo sapiens
gtctcagctgtgatgctcctcggaggctggctcctgttggccttcaatgcaattttcctcctgtcttgggctgtggcccccaaagggctgtgcccaaggagaagcagtgttccaatgccaggggtgcaggcagtggcagctactgccatgattgtgggtctgctgattttcccaatcggccttgcctccccattcatcaaggaagtgtgcgaagcctcctccatgtattatggtgggaagtgccggctgggttggggttacatgactgctatcctcaatgcagtcctggccagcctcctgcccatcatcagctggccccacacaaccaaggtccaagggaggaccatcatcttctccagtgccaccgagagaatcatctttgtgccagaaatgaacaaataaaaatctcctgggagtagcacaaagggcacaagtga

SEQ ID NO: 905 - DNA, 237 bp, Homo sapiens
caagcaagaagatatctgagaagcctgagacccatgccacagttcccccaaaggagcaagggaatgctggaagttactgaaggagaggaaagcatgtagaatccctggatccaaggcaaaggaagaaagcactagaattcaacttgggtctgcaaaaatgaaccacaggaagacctagacaggctttggcatcgctatcatggtaacctttgctactcataaacaacaattcacaag

SEQ ID NO: 906 - DNA, 633 bp, Homo sapiens
  misc_feature (1)...(633): n = A,T,C or G
gcacactggacccttccggaaagatcgcaggaagcgagtcagagccgagtctttttcgttggagcttacattctaggcaaataaggtcatttccgccagtgatcagttttcatgacaaagaacatacaactgtgatgcagtggactgacagaaggaccagggaaatggggctgctctttgggatgcgaatggtgacatcttcaggagacaacatctggtctgagacttgattgaaaagaaagtgctcaacttctgaaggtctgggggaagagaggctaggcggaaatcagggcttgtgcaaaggccccaaggcagcaagagctcctgtgatcaagaaacagagagaaggccagtgtggccggggcatgtggaggcgtggctgagccttgcaggcaacagcgagccagaagtcgggcttttattctgagtgcagtggaagccccttgggggttttcagcaggacaggcagtggcatgaaagcagaactgagagagctggggttacctccactgggtttattctctttccacattctctggaagacactccactttctttctttaaaactgnaattncccttggttgactttaataaccanccaagaacattttttcagctggttaaattttttt

SEQ ID NO: 907 - DNA, 647 bp, Homo sapiens
  misc_feature (1)...(647): n = A,T,C or G
attatatcttggccaagcacagagattccctgaagggtccgctcaagaagcaggaggtggattcagccccacagcttcccaaagtggacctactgacggtgcctgcagtcgacacgcagatggagacgcggcccatgaccctggaggagatggaggaagtgggcaagcggtaccgcgagcggcagcgacagcacaagctcacgatcccctccatccagtacacggagcaatgtcacctggtgcgctgtgggaatcggcactttgatgagcactgcctcccgtccaccatccacggggatatgagggagctcattgactcggcccgcaggcacaactttctggtctacctgcaatgctggaagctctgtaagtcctatggcctcccgctgacagaggacatcctcatgaaagccttgctgtacccaggagacgagatcattttccagatggacaaagtgtgccccatccggcagccgggaggctactactctgactggaaggtcttttctccgaatctggctcttgctccggtcccanggcccctggaaaacgcccaaagaaaagcaagaaaatgcgcttttaaggagttgaggaatttaccangaagcttgaangggggaanggncccagggcttgaagcaaacaca

SEQ ID NO: 908 - DNA, 298 bp, Homo sapiens
attattgacaagcaccgtgggctcaatggtgtcaagttgtacttgtggtttcaacaccccgcagcaacccacgtagccgctgggccctggattaggacccccagtctggcagtgcttatctgcccgtctgagtgatggagagatgagtatcagtctatacctcaactgcttcaagcccgcctgggctttctccctggcgcctttgtctgtgtcagggttggagcaacgaaactgaaagatctccagagtttgaaaacagagtgaaagagcaaatttaataaatgagagctcagcctcg

SEQ ID NO: 909 - DNA, 197 bp, Homo sapiens
  misc_feature (1)...(197): n = A,T,C or G
gntggctggaaatattcanaatgagagcccacaattcanctctcagtgccgagggacttccttgnctgatgtactgtngagcagcagnactatcttgttctgctanaactatcaaaagtatatgaaaatctcctttgaaaactcagaatgtaagaaacatcactgaaatcttcaattataaatcttttgggaagctg

SEQ ID NO: 910 - DNA, 645 bp, Homo sapiens
  misc_feature (1)...(645): n = A,T,C or G
atgggaccttcacaatatattcattgttcagctggaaaccctgggaagcagtaatctgagctccttgtcctgaggccacttggtggccatctccatccaatgttgtctgtggaccccaacagagggctgagcagctgtccgtccttgactctgggagaaaggcgttatcatcaagatttccataagtggacagaagacacactgaccatgaaaggaaggccagcactgggtgatcattttcattctaaatggaatctcatcaaataagcaaagaagattaagcgcagagaaaagacaatgctgtcaccatgcccatgccaaacacttttcatctattcttctgagactagctctgagaagttacctgggagattttacctatgtaagaagacaacctttgctcactgnggagttctgtccctcacttttctgcaatttggtggaacatccttcagagatcaaaaaaactttgttctaagacattggctggtcttgggactcattcaatctccctgaaagncacttactaccccttaaaattacctacatttctcatttctctcttccctatgaaaaaagtatttaagcttcaacccccttgccctttntttgagtttcatattttggatgggtccggaaacactt

SEQ ID NO: 911 - DNA, 639 bp, Homo sapiens
  misc_feature (1)...(639): n = A,T,C or G
atggcactggctgaggcagaatgaatacagctgctgattctgatctcacactgggtatatccctgagtgctggaaaaaacatcaccctcagaagtgtgcattcagccagctgcctttggagagagccgggaagggtgcaaagtggcatgtcctttaccagtcactctttctgggccaatgcttatccagaaatgagacagaactatgggtttactgcaaatgaccagcatccgcaaagtgatcaagactaccaactttggtgttcactctgcaatgaaaaaatgaaccagcagaaggtggatgtgaaagactaagaagagccctgcagaaaacccgttagcccatgttttcatctgtaatgtggatgtgggatgggaagagggacaacgacatagtaccgaccaggttccagaaactattccaagtgctttacgtgataaaaatctcttaattgtctcaacgaccatacgaagtatatccctagtggtgcccctattttatagatgacaaaaccttactgatatctgtgtaactagtaaagtaggagagacaggattcaatctgtcagcccacttntgccggtggccgngtcccttgttttgggatcctgacaggcagnccccanccaggaaccccgtc

SEQ ID NO: 912 - DNA, 629 bp, Homo sapiens
  misc_feature (1)...(629): n = A,T,C or G
gtcttgtagaaatttgcctgatgcaccccctagatgtggtgaaaaccaggtttcagattcagagatgtgcaaccgatccaaacagttataaaagcttggtagacagctttcgaatgattttccaaatggaaggaaccacagcatgtgggtaagaaacttggatctgacagcagaagaagaaagaggatattgtatgccttcaatcagctttgtattaggagagccttaaaggaaaaattttgtgaaaaaagaaagaggaagaaaacaacaaactagcaagatctgtatttcagtataatttggagaaaatgactgatttgggttggtcatgttgccagaacagatgactcaaggcttccatacaagaaatggaaatcaggaggatgcctgaagcctgaaagaagaacaaattgtaaagatatgattgactgtaaggcttcaaaatcaactgtaccaaagatgagcttgaatcattgcccagaacagagctgaatggggatgttccattgggttctggctgntgaaacaaaataaaatgtagtaattgnaaaaaaaagaaaaaaaaaaggccagcgaggccaattcancttggcttaaccaggctgacttgctcaaaagggggggggggg

SEQ ID NO: 913 - DNA, 644 bp, Homo sapiens
  misc_feature (1)...(644): n = A,T,C or G
aaaataggaaactttccaaaggaaaacaacaacaacaacaacaacaacaacaacaacaacagacacccagtgagtcttaagtgcctctgagaaggtagagttgaagagggagcaaacaaaattaagagatcaaccctgcaatccagaaactcagctgatggccagtgttacatagagccaagatttaagtgccactttgcttctcttccagtaaacaagacagataaccaactcatgagttgctccattttgcatttctaccagcaatgtgactactctcccctaccttcatcaacacaagccatgcagccaccgcagcaggtgatgcctggattctgctgcatccaggctgcagatgcctgatacctgacaccctcggaactgacgtctgcactgagagcacatctcccaactgcagagcccaggtgatggtgctgctgccagcagaagtgctgatgggccaagctcctacaaagctttcttggtcttctggagccttcagtgtgttgaagccacaccaaagcagaangcgctttctcattagtggaatagtatggtaattggacaccaaagctataccataaaatcatcaacactgnataattggtgctattgaaaatgcttatgggtcattattaaacatg

SEQ ID NO: 914 - DNA, 634 bp, Homo sapiens
  misc_feature (1)...(634): n = A,T,C or G
atgggcaccatgtggatgaattggtggtgtgaaacgctgtttgggaggaaacagccccagcccaaagccggcaatcctatgtatctcctttcttgctggcctatcataggacaggtgtgtttcttacagatacaacaaagctttaaagcacgaaaaagatgaactcgaaacaccagtgactggaggaaccatgacaacacaaacaagaaggaaacaagaaagaaaaagcataatcctggtttttgtgttctgaattgtggatttgaaatggaggctcccgtggctgctgacagcctgccttgatgctgctgatgtctgggtgatgaacagtcatgggtttcctcccacctgcctctgtggattaatgaagagcaaggcaggaatggcagacctgccatctggaatgaccttacctgataagattgttctgccttccccgccaaaggtgaggagggctttcaggatgcaggagactgttttccccacaccttaatgagaaaaattgacctgtttattcaccagctgncttctttgtttctaatccaagcaattgctgcaaaatcgntttcacttctttcatggtgaaatttgagcagaaagccccctcgagtggcttatctttgcagacaaccaa

SEQ ID NO: 915 - DNA, 553 bp, Homo sapiens
  misc_feature (1)...(553): n = A,T,C or G
gacaagcgcgaccacccacacatgacggtactgtgaggggccagtagtacgaatgaatcccaactgggcggccctgcttccctgcctcaacccagggctgtgtgcttcccagcaggcactgccatctatccagccccacagtttcccagcactcagcacttctgatgcttggcctcaacctcgccaccactggagaagatgaaggtgcattctggtggcttccacaggtatgacactgtttcctgggacctgaagagaatgcactgtctacaacctgagctacaaccctgcagccacatgctgaataaagtgcttcaactcacagctcaaaagcccatggccagagtgctcttgggactcctgctacaatttttgtttttcactcacaagtacaattaaggaaataatcttttgggtttaagtgtaaatactaaaatctgccctgataaggtccttccccttgcatgcaatctatttatattctgttagcaggcaaggaacttcctatggntaatctgcttgatttgggggggagagtgtaatctttaaaaag

SEQ ID NO: 916 - DNA, 167 bp, Homo sapiens
gaaatggtacttttggatcacatgtgaaggtttaaaaaaatacagctgccctggcttcctgaaatctggaaagctttacagcatgaaagaagaatggtttcattggataataatccatctgcaataagagcaaagtccatactactattaaatgtgtttatccactg

SEQ ID NO: 917 - DNA, 184 bp, Homo sapiens
ttacaccacgcctcctgagtatgacagcaacattccttcagggattaaagaaaatgcttcagaagattggaacactgctcagccttcccaaccttcttttaccactgatgtttctaccttagtgatcttcctccttattttaatgcttctttctctttacaattaaaagttcataaaatctttc

SEQ ID NO: 918 - DNA, 441 bp, Homo sapiens
  misc_feature (1)...(441): n = A,T,C or G
taccctggaagtgctcagtacatcatatgaaccagagtgctggccaggaatgagaccacgctttgcctgttggtcaccgcatctccagggaactcagaggcatctccaggaaacacctgaatatgtgagctggttccttacaacagtccaatgaagcanaggngtgagcagatcctttttacagctaangaaactgaggcacaaagaggttgacagcacacttgccccaaagcgcagatctgaaatccaggcagcgctcactccacttggcatctgctgcagtggctcaaaggctgggtctggagtcatctgaaaggccttttcacttnttgtgtctggganggcaattggcccttgccagctnggacttttccacgtggctccatgggtgcctcacaacatggncctgggtcccaagaagacgagatagaacatttttag

SEQ ID NO: 919 - DNA, 325 bp, Homo sapiens
  misc_feature (1)...(325): n = A,T,C or G
tctcccttgcnngccttgaggaaggagctgccatgttggaggctaccctatggagaagcccatgtagcaaggacataagggtggctggtggcccagacagaaaggagctgaggctctcggcccaacagcctgaaaagaactgaagttacacccacaatgacatgactttggaagcagatccctgagtcttcagatgagacctcagaactggccaacaccttgattgaagccctaatgagagaccctgaagtagagggccctcctaagccatgcctggatccgtgactcataggaactgtgaggtaataaatgtgtgctggttgct

SEQ ID NO: 920 - DNA, 508 bp, Homo sapiens
  misc_feature (1)...(508): n = A,T,C or G
ccaatttgagccagggaactgaagcagtattcaagagccttcttgttacactggcaccttctgggaagattaagcatctgtcatacctacctccccttcagaggtttggcaccaattggtacaatgaatgagaaaaggggagagatggatatgccgaggtacattcatggcaaatgaagattcaataacctcacatcagtgagcattaacattgatttcacagggggttgtactcagaaaggtgggcagcaatgcagagtcatcatgaagtacctagcagtaaaactgtactgcactcaaagaaccaacatcactgcagccagtaccccattgcattacaagcagtgactgcatttcagcaaaataacaacatacatcatattcaattaagtgtggnaaatttgtatttttatttgggttactgaatttaaatctcatctgcaaaacaattttaatggntntttngaaaggaaggggnttatataaagtttatgttggaaatcctaaa

SEQ ID NO: 921 - DNA, 370 bp, Homo sapiens
ccagaaaacctcccctgccaactcagcctgatagaatgatggcttctactcacatcatcctggacatcaaggtcgcagccagccttcagcaagatctggaccacaggaagatggcccttattggcagcaagatgcaggggagtccggccatgctgtgaatgcaaaatgaacaatgatttcggaacaagtcctcaatgctactcccttgggagacagagggcctagagcaaggtttgcacaggggctttcggatgatcactccctcctgcccctttggattggcaggagattcttatgggttaaccaaaattcaagtttgtctcagttaaccttggctattgtcattgcaatcaatgaacacgatatgttc

SEQ ID NO: 922 - DNA, 515 bp, Homo sapiens
  misc_feature (1)...(515): n = A,T,C or G
ctacagagaataaacatatgtagtttacgactatagccacattatatctctttggaacatcactggccaagacaatgaaggaatagaaaagacttacggtatagacaattaatctagctgaaaacacagtcagtctgagcaaggtttcttgctcctaaaattagaaaagaactcctggactgggtgaggagggtcaaaggcataacgtgagagctaagacgcaggttcattcttgtgacctgcatgacccttaactctctagccttatccctggagaggagatggcgttttccccagataaggttttgggatcagagggaaaggtacttgtgcctcctgtgccaggcagagttctgatgaggcagcaagattccagaagagaggactgtatggtcatcccagcaaaccaggccttaacagcgtcattacatttcccacgctgcangggaaggaaattttnacattnccnaaaggggcccaaacntancagagcacctnctaaatttatagaagga

SEQ ID NO: 923 - DNA, 273 bp, Homo sapiens
  misc_feature (1)...(273): n = A,T,C or G
tattctaggacangaagaagcaggaagagcaaagaggaaaaatgaaaagaagcaatgcctgtcaagatccacaaactttctcagaaatctccaacagacttctacatatgtctcattgaccaaaaatatctcatatgttcatccctagctgctcatggccctttgaataaaaccaaggatctattgacaaagactgggagagtagatatttgcaatattagcagtgtctaccacaccaacttccagtcattcaactaaggtcttttctgccat

SEQ ID NO: 924 - DNA, 521 bp, Homo sapiens
  misc_feature (1)...(521): n = A,T,C or G
ggtgcagatctgcgtagtgaaactacccacagcaaggatgtatgcctgtgaggtggcacagaactgatggatcagacttggccttcaacctcctgttatcctgatgaaattgcaagctccaaacaacagagacacaacattgaccaacagtaagatggcttgaagaaatatttctttcaggacaaactctgtgcattccatgagggtggatggatggacttatgaggacaaagccactgacatcatgagcaggaaacaatgcttctctcaagctgcagcttcgaaatgtcaaacagcctcttccttgggtgacaactgctttctgactcaaaggaagaccttgctctccagcatcaggggctgtcagaaactttgcttttgagtaagtacaacatcacactgcctggaggatctaggtccacctttacacagaagcacagagctncncaagaaaaggggtttnnnggaagggaaaatttcaaattnggttggactttatggggttntaaaggacaaaagga

SEQ ID NO: 925 - DNA, 512 bp, Homo sapiens
  misc_feature (1)...(512): n = A,T,C or G
atacaagtggatcctctaagaaacttgggagccttgtgggctggtggagaactctcaagatggcaccagcctgtctatggtctatgtgggaatcaccgccatccttgccattccatgcagtgtaccatgtgatgggctgcattacttagtgacaatgctaccttctcactccttgcacagaggagagacagacacctgcttgctccagggcctgcctgagctcaggctctgccacagggatgaagaggttggagaatgtttctgccaaatgccaacaacgcctcctcaaggacgattcatggaggctgttagcctgtgctcaacttcccttggcaaaactgcaacaaaggcatggcagcagtttgatgttcacagagaggagtgaatacaaagcatggctttaggcagacttcctttaaacatgcacaggctcctgctgntgncttatgccttttggnggaatnggaaatttcnaaaggggnggtntttccctgccctgtacaaagtttatt

SEQ ID NO: 926 - DNA, 440 bp, Homo sapiens
  misc_feature (1)...(440): n = A,T,C or G
atttatagtaaaatgattacattgacaagctgttctacatccaccctccccgtttccagcgtggagccctgaggcatcgttcaaaaaaggacaaacagcctgagaggcagataaatggatggcctggtgtaattttaaatcacatgaatgatgttgcttctctctcttcccctggagaacctctttccatgtctgactgacgataatgtgtgaaatttttcttacttagcagggagaattagtttgttttagtatccagaacacagcactgtatttggctactagctaagtccaatttttaatatattaccatgcataaacatggngggaggtcaaaaagggccncnctttgggcaagatttttataaaataagctgaggctcaattcatttttctcaaaacgctggaggcccctgcccttgccaagcccaagatccttt

SEQ ID NO: 927 - DNA, 530 bp, Homo sapiens
  misc_feature (1)...(530): n = A,T,C or G
gatacaagcaccttgaagacagagattatatcttggacccctacagcatttatcacagttctctggatactaaggtgtcttaatggaatgtggatgatggggtgtgtgaagtgcattctacctgcgtggagacatctctaatggctgcagatgaagtcctgcctccctggctattctccaccactgtagagaatggccacagttcacctggaatgtcttttttctaactggctagtctcatagaaaggcatttactgctcacacagactgctcctcctggctagcactgtggacccttcattcacaccagtgattgcggtggggtgttgacttctctgtcttacccactaggtggtttctgtctgcacacaggagagctgaatcggccagaacccncaaaaatcccagcctcaccaagagatgacacgtgacctggnggggnctcacccaaggcatacccctttncaagttagnaaaanaaaaaaccntggtcacaggggtttatagttggttatgggccgctcacaaac

SEQ ID NO: 928 - DNA, 530 bp, Homo sapiens
  misc_feature (1)...(530): n = A,T,C or G
gtgttccggctcctgagaggatgctgaatgtgcaagaccacaagtgcaaggaacgccatgctcaatcactctgcaaatgacattacaaccggaataaatgcaaaggcagcaggtctctttaggacatacacctacacacagtgccaaactcatcctgtggccaacagatgtacagagaatcccagagtgctttattaaggatgggtgactgttcatagttggcatagttggtttcctaaacctgggaagctcagcaaaccagttttacaaaaacatcaatagatgatgatggtggtgatgatcttgataacagtgttaatgattatatcagaaactagtacttctgagggtttacaaggtggcaggcactgaggcaacatcttcctataccttctctcatgtgattcttccaagcatcccatcagaagctggccaangggggtcatgtctgtnatcncacacntttggaggccaaaacaaaaggatcgnttgaagtcaggagtttganaccagcctggcaacacagaata

SEQ ID NO: 929 - DNA, 518 bp, Homo sapiens
  misc_feature (1)...(518): n = A,T,C or G
actggagatatctaagttttcataagagatcatcagaagaaaatgaagatccaggctctctttcagctgagaaaacgcatccacaaaattccaaagaatacctggaagaggaaaagagacacaaagacagatacacaaggagaccatgatgaggcagaagcaagagatcacagtgatgcttctatgagccaagaaaatctaagaactgccagccatcaccagaagctaaaagagaagcctgaaacaaattctgcctcagagcctccaggaggaatcatcccgggagacatcttgatatcagatttccagcctccaaaactgtgaggcaacaaataatctgtcattttaagccaccagtttgtagtcacttgttccagcagccctaggaagctaacacacagtcagcctccattttttgatgnttgaccacacacanggttgaaccctnccgnntncggcttcttcttattttgaccngggaaagtngataaccatgtggnggggctccctccttgggg

SEQ ID NO: 930 - DNA, 495 bp, Homo sapiens
  misc_feature (1)...(495): n = A,T,C or G
atcgcttcttgacctgcacaactttctgatttgatgagttcaacagaaaccaactcaaggtagcagatccagaaatgattagaacacttaggataatgaattattacattttcaaggcacatcagtgaatgttatgaagagggagaagaataaagacattgttgaacttagactttgacaagatgcatattggatatctaaatagagatatcaagaaatgaagatatgcatttccagttccagagagaaattcacactggaaatataaatttaggaattttaaagttagtggtcacatttaaagctgcagaatacaaagagatcacctgtgtgagagaactgagtcctgaaacatacccgtgtttaaagatctgggaggngcagaggaatttcaaaggaggctgagaaggancancngtgaggngggtgaaaaccagatagcnaaagaaagcngaatttggactgacttcctttgnaaaaattaaaaatgtaagg

SEQ ID NO: 931 - DNA, 410 bp, Homo sapiens
  misc_feature (1)...(410): n = A,T,C or G
cagactgaggacctggatatctttgctggttcctgaaactctgcagacagtcctaagggatccagngggtcctctgatggnccccaatgctggaagtcacccatatagntctgaaaagttgtcacaanaaatggccgtttntggaggatgcncaggaaacttttcatttggcatgaaaaaggctnttggntttgcaaagacttgcagaaggaagaagtttaaattnttgagccctcaaaacagatttttagaaaagtgtcttccaacctttgtttngtccaaataaaggaagattnngacccncnaaaaaaatgtanaanaattaanantaaaaattnnggggggnggggggggggccttttttttgtgnntntntncccgngngtttttttttttaaaggggggggggc

SEQ ID NO: 932 - DNA, 510 bp, Homo sapiens
  misc_feature (1)...(510): n = A,T,C or G
cctatggaagtaattatggattaactttgcctgatatttccaatgaattctccatagcatcaagcacaaatgatgatctcctaggacagtggcagcttctgagaatgcacaggaaagtgaccagggaaagaatgattccatctccaggaatccctggtgatcttcagagcccagacaggaccctgctgggccatggtaactgagaaactgagaagcagatacagtggtccctatgttggcaacctcagctgaagaggaacaactctctctataatcaaggacttctgaaaccagaaattaccagcgtggggagagaacattaaaggcagaggtgtctcttataagcacaacgtgtgaccaggtaatactgtctggattagcagctgtacagcctaactaagccctggagctacaattatctggtcgcattaaactgaaatcacctgaaaaacttncactgaacaaaccctttggaaagtgttnaatggcncnttcacccccaaaagggaa

SEQ ID NO: 933 - DNA, 631 bp, Homo sapiens
  misc_feature (1)...(631): n = A,T,C or G
cttcgcggggtggaggganaaacttctttncggnctttccagtgggggatcgaacgggtatcgaataagcttttgatgaagcccgccacatgggantcggccccttgaaccaaagaatggaattgcaccgcaaagttctcccggcccgctttggggtgggagangnctattccgggctatgaactgggccacaacangacaaatcggcttgcttctgatgcccgcccgtngttcccgggcttgtcaacgcaaagggccgccccgggttcttttttgtcaaagaacccgaaccttgtcccggttgccccttgaaatggaaacttgcaaggaacgaaggcaagccgccgggcttatcngtgggcttggcccacngaacgggggccgtttnctttgcgccancttgttgcctccgacggtttgtccaacttggaaagccggggaaaaggggaacttgggccttgnntatttggggccgaaannngcccngggggcaaggaattcttncttggtcattctttaacccttggcttncttggncggaagaaaaagnaatcccaatncaatnggcttgaanggccaanaggcnggggggcttggantaaccctttnannacccgggtaaaactcgtgg

SEQ ID NO: 934 - DNA, 503 bp, Homo sapiens
  misc_feature (1)...(503): n = A,T,C or G
ctgaggtcatttgactgaaggccaccaaaacagttgtctcaagtgtgaaaagagatcactatattttgtacaaatgaagaaactgagttaaagaaagattaaatgtcctgaacgataccaataactaatgactgatggggtggtgggttctttcttattgcatgaatccttaaaaacagaaaattgttcctgggcgtagtcacagatcgatgtgaagatagaagacagcaccagaatcaatgaactctgcaaagatcctggactccttctcctgctgcataataaaggaagtgaaattctgcttcatcgatgaataacaggattttatataaaactttgaatgacataggagggacaatttgcatagaacaacaagtcctcaaactggccacaagctgtctgcactgttnttttgaggatttccaaaatgccanaangngcactaacagctntagatacttgagtcnacaanaaacctntgnncnttttttttttaaggggtt

SEQ ID NO: 935 - DNA, 155 bp, Homo sapiens
tggaccagagtgacctcccaccttcaaggactcctgatcactttaccttgattgtctacaagggaatgatttacaaatcctacactatgaccatcctcaagaggcctcattaagaaaagcttctcctgtattaaatccaaagctgttttcattgt

SEQ ID NO: 936 - DNA, 535 bp, Homo sapiens
  misc_feature (1)...(535): n = A,T,C or G
gtttttgtcaagcaggaaaggatttgcgtttggtatcactgtgtatggaacaaattgacatcccagcaggattcctcctggtgggggccaagtctcccaatctgcctgaacacatcctagtttgtgctgtggacaagcgatttctaccagatgatcatggaaaaaatgcacttttagggttttctggaaattgtatcggctgtggagaaagaggatttcgatatttcacggaattttccaaccacattaacttgaagctcaccactcagccaaagaagcagaagcacttaaagtactacctagtcagaagctcccagggtgtactgtctaaaggacctcttatctgctggaaagaatgtagaagccgacaatcctctgcttcttgccactctattaagccaagctcttcagtgtcgtcaactgtgaccccagaaaatgggacaactaatggntacnaatcagganttctnttaaagggaccccccnctttgcccnnggnngggnngttaaaaaaacaaatttgttggggggggtt

SEQ ID NO: 937 - DNA, 488 bp, Homo sapiens
  misc_feature (1)...(488): n = A,T,C or G
gcttttggttttggaccatgagaatggcttacatattcaaaaggttggatttgggaagcaatgctaagcagtggaatggacatcgacatagagagatcagctccacacttatactctgccactcaacttccccatgtgacttgaggatcactctaactccaaaacatagcaagctcgcggaacatcagggttcatgcaaagtattccaaggagccccttgaagcaacagaatggattgctcttctatggtggaatggcaccctggatgattaaaaccgtagcagcaaacaaaacctccatcaagtaagaattcagagtgtgagatatcacgcacagccacgcgtggatctttatatacgtgtcaatgtgtttgattgtatttttgctttcaaagtatgtattgagcatttcttctaggtcctcaagtaacatctttttttaaaaaaaataaatgcttaagggaattgntttatattaaactcgctttc

SEQ ID NO: 938 - DNA, 482 bp, Homo sapiens
  misc_feature (1)...(482): n = A,T,C or G
ggcccattgatgaccacaaaaaggaatgtccagtgcagctgcgggtccacttgagccctccaagcaagcactctcaagcccgctctgtctgggagctctgtgttttcagagcctgttgttgcagcgatgcctggaatccttgacacctgcacaccagcttcctgggcatttccacaccctccccctccccacctcctgcatctcccatttgcatctgaaatgcagctgctctgggccctatagaggaaagccaaatggacaggacatctccttgtttgttctccctcccctgagtcaaaccgaatctgaagctcctctgtgcgacgcctttgttgcctcctcattatgtttaaatgagcctcatctgcaggaggatttttttttaataaaataaaataaaaccaccacaaaaaaaaaaggccagngnggccaattnagcttggacttaaccaggcngaantttttnaaaaagggggggggcc

SEQ ID NO: 939 - DNA, 525 bp, Homo sapiens
  misc_feature (1)...(525): n = A,T,C or G
caggaagccctgaagatgcggcaagctgttctctactttcttgctgaatgagcaaatgctctaaagagaagtaacagaagaaaaagatggttgtgccattgaccaggtgccgttctcgttgcccattcatttcctgcccgccctgcacacatcctgcccctaggaagcctgctcctgaaacaagtctctacccgcaagaagggtctcatgaggtgccagcctcacgatcttggacttcccagtctccagaactgcaacccttcttagctaaggctatggattggaacacctacaagtggtttttccacgtggacctgggctttctcaaacatggtgtctgtgttccaaagatcagaagggggtgactgaagtagaagcgaagtcagcaacttatcttcaggcataactacttttcctgtatcctgaaccctcgagaggggatttcttgaagaaaagaaaagaaaaaaattcccccttnttccctgggangnggaanagggtgggaaaaaaaaaagggctttaaaa

SEQ ID NO: 940 - DNA, 160 bp, Homo sapiens
gacatcaaacttcctggtcctcatgcctttagcctcagactgaatgacaccaccagctttcctgcttcttcagcttatggacagcaccgtcgtgggactcctcagcctccagaattgtgtaagaaaagttctcataataaacctctgctggtatctcttt

SEQ ID NO: 941 - DNA, 122 bp, Homo sapiens
ggaaactgagaccacatggtgaagaatctgtttggcgaaagggctggaagattccggggctgtgcctgcaatgagggatatacaacagttctccctatgcctggaacagagaacctcctctc

SEQ ID NO: 942 - DNA, 304 bp, Homo sapiens
gatatgacatcttaggaagaagggactgggggaaagaaagcactttctgcttctgtggatataaacacacagtgttttattccctagtgcaacaaaaccccaagatcaacagacaagagctgaaaaccctttcccaccagacacagtgccatctaaatgttctctcaaaagatagcatctcataaacaatttcaacaaaaggatgtcagcttttactttatgtgcatgcacaaaatcacttttcaggaaaaaaaatgaccattaccgaatccatcataaaattaattacatttagttgatcacg

SEQ ID NO: 943 - DNA, 155 bp, Homo sapiens
atggcagagatggcaagcacaaagaaatgagattcacgctattccatttgcatggatgaaaatacagacactttctaagtgaagtagaaattctctgacaattaacaagaagagtttctgtgtccgagatatctaataaatgttatttgctcaag

SEQ ID NO: 944 - DNA, 285 bp, Homo sapiens
gatcccagtgacattttactgcaacaaaaccaaactgtatgaagttaagccctgtctccaggaggcatgaaaccacctccacttctcgtgatgctggcttcttctcaaaacaatctcaaagacagctccccggatattttgaaaattcagcttctgtttttctgagaaaaatatattaataacttctgaattctctgacattgaataaattgaacaagagtgttagctttcatctactgggaaatattcaaagctaagtctactaaattgaataaaacttttaat

SEQ ID NO: 945 - DNA, 442 bp, Homo sapiens
ctccattgctgactggctttaatggaaagagtatttttggtcctgtttttgaggtttgggacagtaacaagaaaagaagcaatttttacatttaaatgggatgagaagttcaacacaaatatctgtagcaacaaggaaacatctcgaaaaattcttattaaaatttatacttaccgttgaaactacagacatatgacaactcaaaaataaacccaatttggacgtggaatgtttctttcaagggtcaagcatcctgttctggttcattttgatgaagcctatctacataaaattggaagaggcttgaagatcttttggtgtcagtttcctcatgtttacagtagtaggaggctacagatatctctaaaatacttctgttctaaaagactctgcaattttaaatggggatatattttatccaaacatggtaatgcctttgcca

SEQ ID NO: 946 - DNA, 670 bp, Homo sapiens
  misc_feature (1)...(670): n = A,T,C or G
tgggggggggaaggcctttacccccttggcccattttaanagggttccaagggaaaaccttggganggggtaattaanttttaaagttttcttttaaccattgggaaaattgggaccaaggggaaaaagggaaaaaanccaaaattgggaaaaaattttgggaaaagggggaaaaagggggaaaaggaatgggaaaaccggcctttaaagggtgggtccaangggcccctcttggaagccccccaaagcctaaaaggccccantccantaatccccccttggtggaatccttggcacccttaacaccattcccaaggaatggggcccttggaaagttaaagtggaaaagaatccccccaaaaaagaaagtggaaaaaaataagnccntttaaacctggatngggcatttcccnccattttgggggaatttggtttttttgccctcacccttaactggaatcnaatggtancttttggaaaatctcccgcacccttaaaaaaangttctttttgttaatttcttccccaccctttgaanaatgtacnttttgggaanatccaccctntgcccggcaaaacaattggntntttaactccaccgcctntcccaaaaccttataagaagctaatgatantcccccccccctttgntggacctccttttttggga

SEQ ID NO: 947 - DNA, 315 bp, Homo sapiens
  misc_feature (1)...(315): n = A,T,C or G
ctttaaaacttctgaacttaaaggaaactaccaagaaaaactaccaagaaaaagaagttgaagatgttgaagttgaagatgacctttctcttcacaaggtcttcataaagaaataataagtctaataaatttaacgatgtgtgatcatattctaaaatgaaataacagttttagatttttgaatgaaataggtaaaatggagcaaatcactttagagttctgcattctgaagaacacaaccaatctccttacctgnggngnatcaaagataatattcctcaacngtattaaaccaatttattgccaggctctgtc

SEQ ID NO: 948 - DNA, 495 bp, Homo sapiens
  misc_feature (1)...(495): n = A,T,C or G
ctctcaacccgtctcccctcttccccattatggactgaaggtttctgtccttccaaagttcacaagatggaaattttaaccccattgtgatgacattagaagataacgagatgatgatcatactgtaaaagcccattcaanganggtnaaaagnagcnaccctnnacnccccaggaagancnnctggnacnatcatcaacacagaagatgacttctgtggccaaatgtgtgggagtttttcaccactcaccaagcagcaagacaccaagctgggtgtcctccaattcactgtgacactgtctacccggagatctgtcatatcgcacagggtgaanactcaattnccaaactcccccccaccngagcaaatcccacctntgggnattttngcccccnctttaaaatgggtttttaaancccattnggggttggttaattggtggggccncttccnaatttaaggaaaccctttctggtttttttaaaggggggggg

SEQ ID NO: 949 - DNA, 582 bp, Homo sapiens
  misc_feature (1)...(582): n = A,T,C or G
naactgagctanggcnaagggancctgntacantggtggattgctccgaacaggagcngcctgttcgggccgagctccggttccctccgagagcggnttgcaaatttctcctaatgtgggagactggtgcaccaggccaagtggnccccacttnccctttttcaaggactggtgnaaaccaaatgggaatttgcccccgaaaagtgggctcccggggggcccttgagaagggatcaagctgaggaagctgcaaaagcttngttaacaaggaaggggcaccaggccccgtggttgtgggccggaaacaaaagccaacctgctttggtcntcttggcaanaaattggaattgcccngggnttcnaaaaaaatccgnaaaccccaccttgggggggccntttttaaaaaaaaaataaaaaaccccaaaccggcntttgcccntntaaaaaaacccccaaccttttggcgnaaaaaaaaagggaaattttggggttgtnaaaaatttttntttttggnaaancttttcnnggggnaanaaancccttttgaaaaaaaancaanntttttgggnctttggcccaaaa

SEQ ID NO: 950 - DNA, 500 bp, Homo sapiens
  misc_feature (1)...(500): n = A,T,C or G
aacaaagcatcaggtcaagtacccaaggccacaaggtgaagaagttggagtcaccaggttcattctgactgtaaagcctcaccacatcactagcaggagaagatggagaagcatcatnatntgacncntgatgaancaaaaaattggnctttttnaaaanngcngnccccanaatcttcacaagccatcctgaccatcttgcaagagtgtcaggagatttcactgggtttcttgtgattatattcagagattcttgtgatgacattggtggggacttcagttggaatcactgntattcttatccactttccctggatggnccctcagttncttanccaaggtanaanccaanaaggcangggttacagaataaaagtgctntgggaatgcanaaagatatnctactctgcctgaagganaanaaggcttctcactnttaattgggcnttttancccaaacagncccttgggagnggggaanaaaacctgagggggcattt

SEQ ID NO: 951 - DNA, 503 bp, Homo sapiens
  misc_feature (1)...(503): n = A,T,C or G
aggcagcaacatccacttggtggtggtgaaggatgattgagatacttggactggaaagcttctagccaaggctgacacataaggaagattttaggatgactttgttgaatggatagagaaggaggaagagcatggtatatggggtctctgttaccctgaatggtgaatttcagctgatgttgtaaccagatgccaccttctctttttcatgattagataacacatagattacccacctacgggatggaagctgttagaagctggcctttcggagagcaagtggggaggcaggtgatggtgtttcaacgccttgctctaagcctctttatcaaagtggctacatatcccacccaaattgcctttgaaacttggcaagttcacttgacctgagaagttaagtgctgctggaaccccagctgaacacattgtcctgggaananaaaaacnnttngcncctntntccttccttgcatagaaagggtaaatttgnttacagctttccc

SEQ ID NO: 952 - DNA, 481 bp, Homo sapiens
  misc_feature (1)...(481): n = A,T,C or G
agttaaaaatctgcggtttttaattgcacctgaggatgcccccctgctctgttcctagctggtgttcgacaggcggaacggaaggattgaagagctgaccacaatacctcccaagccactgtgcttcttacagcatggcgccaatacccgtccctttgagaagtggagtctttgttcccttcccttgagttttggcaggactctgactatgtcagaggtaaatttatgtgacttccgagactgggtcatgaaagacaacaccggttctgcccagttccttaaaatgaaggaaggctggcaccatggtgtgaggaagccgaaaccacacagaggctgccgtggatgctccaccaactgcccactgaggctaacccnccaacatgggcatgaaaacatntttaaaanaantnttggccccacccccccgaatggnagaaaaaggtttcccaaaaaaaaccaccccnccccccgggactggggg

SEQ ID NO: 953 - DNA, 507 bp, Homo sapiens
  misc_feature (1)...(507): n = A,T,C or G
atattggctcacttactggatcaaggcagctacattacaaaaaagaaaataatttggacagaatcaagaagtctattataatgtaggtatttgaaatctacctccttgctgaacttggagattgatctacagaagaaaaatcttagcatctaaaggtctgttttcaggaaaataaaaatgtctatcaatctaccataaacctgtctgggttatcaacaaccatcaatgagaagacccaggggaaaatttagggacagagagcactgctcagacttcatgtggaaatggaaagctgagcagtcgcctgggttgaaagaacagaatgttcttcactgcactgtcattcagcttccaggaatgctgcatttcagtgggtatgcctgtcatccagccgctaattcancttgacaaggcccgaacccaaatcatnttgaaancccaanntttcctttacgggngccttntgaaacaaaatactttccaaaaaaacanacggtttggtctgga

SEQ ID NO: 954 - DNA, 487 bp, Homo sapiens
  misc_feature (1)...(487): n = A,T,C or G
cttccaagcaagctaagcaatgtacgttctggcaaacggacaccaacatccacgctgcattaatcatcggtcccacaaaataacccaaacaagacccaatgactgactgagagaaagcctcaagtctgagatgagacgtctgccctctacagtctgttgtgcccatactttctcctacaacaaagcacacccgtcactagaaggcaggatacactgtacttcttaagatgtgactcagagaattaacaaggattcttcctgcaaggtcaaagatgataaatatgaatgctaatgtcctgcactcatcagttactcagtgaaagagactacacgtaggtcataaagttcctacttgccataagattaaacaatgggctactggctttcttatttactgaacatcanaatgaaagtcattgtatgggcctgtntganaaatannntganagggtgggttcccaaaaaancccaaaaaaaaaaagggggc

SEQ ID NO: 955 - DNA, 318 bp, Homo sapiens
gtgtgcaaaatctcctccctgggagccaagtggccccctcagccagcaacagtgacaagaagagatggataaagttgtatcaaatgtctgctgaccttagtgaggggagacagagccacataattgtctacagaaaggattatccattccggtcattgtactcaaatgcttagaaaattctgaacattcttcttgcccgagggaaagtactacgcgatgaacagaactattttggtgtgaaatccacctgattttaaatcctggctttaccataaacacattcgctctgtgactttgagtaaattacttggctttcct

SEQ ID NO: 956 - DNA, 515 bp, Homo sapiens
  misc_feature (1)...(515): n = A,T,C or G
gtttttgtgtggacataagttttcaactcatttggataaagaccaaggagagcgattgctggatcatatgcttcctacccaccaatattgagaaggaagtaaaatggaaaagccaagaaagaatggtcgaatcaggacaccatatgtccattcctggcttctactcctttttataaacacaagagtggaaaggtttggctttattcgacacctcaaagaggagatgcaggaggatgagcagtctgcagtgcaggaggttggagacaaagagaaggtgatgtcacagaaacctacgggcacatggtcccttctccaaggtgagaaaacggaggctcacagaagcataagaacatcatctagacacgcacctggttagtggcaaagccaaggccagaacangctaatangtggnangacttgncntttctcaaaaaaaaattttggcctttggcctttcnanatgatgctggaaccaagttaanactttgggaaaccattggggaaggcatgactgt

SEQ ID NO: 957 - DNA, 268 bp, Homo sapiens
  misc_feature (1)...(268): n = A,T,C or G
cataactgacgatngagaagcantacttcatcatctttggagaatttaccnacggnccctgngnncccgatccccgnnacactttctnatggattttgtnacnntttnntaaagggggaaaaagccntttgacctgaagggcttttaggnagaaaaaacacaaccccggccctcttgtggtgcagtcttttaacattcacgcngnaccgtgnaccccttggggaacattcatctctatttttaaaaaaaatgcttttaaggtatcctc

SEQ ID NO: 958 - DNA, 426 bp, Homo sapiens
  misc_feature (1)...(426): n = A,T,C or G
ctgcccacctctctatgggatgagagacttgagaaattcaatttaatccaattcagcaaacactgagtatctgctatgtgccaggtactgacaggtaccagaaataaagagatcactgtcctcgaggtctggtgagaaagacgagcatttggaagtgctctaacatcagcataatgacctgaacaaggtggcacggagctgagaaagaagcggtacttttatttcctccttctgtacagagtatataaatatattatgaacagtatacagaataaatggaataaagtcaatacctacttcattgccatccaggncaaaaactggaggtttttcctatacttnanaagttccccatgcatccctttcacaattccctcagtctcctaaaaacgaactacaatcctgaccgtttgtaataatcgcaac

SEQ ID NO: 959 - DNA, 491 bp, Homo sapiens
  misc_feature (1)...(491): n = A,T,C or G
cananctnanntgaacaaaccaatgnncgcttnacccaagnagaatgggaannccnantttnaaattnggaaaactgggccctttggtttccttttcaaaangaggtttaaagggcagaagagcccagaaccactcccaatggacaggcttttctaagtttctccttttaaactttaagagggagtttcttgcactgagaagaactgggaatgggcccatcggtcccggaaacatctgggaagaaatcccgtctcattaaagactttcagcaaccattggcctcagggtactgtgaaagtgaatgctatgtgccttgtaaggctaggtgacaaaaatggncatgcantttncaccntgtttttnttatgggacgccnctcttgggaatccaaccctnccataaagcttactggngganggaaaccccatanggaagccccatggcgggaaaggatcaccatgggggagggtaacccagcttaacccaaggg

SEQ ID NO: 960 - DNA, 519 bp, Homo sapiens
  misc_feature (1)...(519): n = A,T,C or G
ggncngccttttctgntccntancnaacangaccccctttccctttggcctactttaacctcttggggangangcaggaaacccccagccaaggaaaagctggccaggggagggaaagaagaaagccaagggaaaagggcacccccagaagaaagaaaggggcttgggggtccccaagctccaaaatggtctcattatcttgtatttgaatatccccaaatttgaaaaattcaaaatctgaaacacttctgatcccaagcatttcaagactcctaagagttaatacgaagtaagaaagaagaagttggagttaaagcagctcgttccaagttctgattttgccattttcctgtctgagtgganctggaggtattttntgccaggaatgtgcanggtttggttaccataaaataaaacattgtgnccatgggngggtttggcttgcacctatcaaccccattcactttaaggtanttaaagcccccagccattgccattaactggttcttctttgggcct

SEQ ID NO: 961 - DNA, 448 bp, Homo sapiens
  misc_feature (1)...(448): n = A,T,C or G
cagatttnatganaacttactcactatcatgagaacatgtntaagggaaactgctcccatgattcagttaccggcncatggttctgcccttgacacgtggggattntcatgtgtctcaccattcaaggtgcgatttgggtgangacacananccaaaccatatnacttgctaatgaggaaactgagncaganaggtntagngatgtacccaagtctgcccggncggngagtggcagagccacgcttntagaggaggacagcccagccccgcatcccccgtgcttctccatgtattatgtccctgcctccctgtttgctgntccactggaatggttnaacatgcaagctttccttccagctgtngngccagnacatggcttncttcctnctcccgaagcngaatcgcgggaagccataggttcagaagatcccagctttctctgctttg

SEQ ID NO: 962 - DNA, 442 bp, Homo sapiens
cagcagtatccactatggccaccatctccatcttccacagaataaggaaaataaaatatctacgatagactttttcctgaagtcacccaattactaaataactgaggtgttttcatctggataattcatgcttcattattgggccactattctctgtcttgggttctcccttggctcctgtgacaaacatggggttcagatccagactccaggaggtagtgatgcttcaacttttggtaacatacaggagaaaggccatatgaggacccagcaagaagttggctatacatgggaagagagaactcaccagaaaccaaccatgctggcaccttgatcgggggccttccagactccagaaataagaaatctacaggagtaagtcagctaagaattctgttactgggtcgtagaattcagctccctccctgtgggataatggaca

SEQ ID NO: 963 - DNA, 516 bp, Homo sapiens
  misc_feature (1)...(516): n = A,T,C or G
gcgctgggactccngnnctactncatntgggtgggtttngngggggaaaaaaaggaggnggaaaacacnccactggaaaactggntcccattggggcctgtcntgcttaaaaaaaggcccagagaggcagtcttgacaccctagatcccaagatctccaaggatttggtggcatacccactccagcacacagaagcatgaggntcatgactctcctcttcctgacagctctggcaggagccctggtctgtgcctatgatccagaggccgcctctgccccaggatcggggaacccttgccatgaagcatcaagcaagcttnaaaaggaaaatgcaaggcgaaanacccaagggttngccaagacaagggccccaaaggccaagggaagcagnagantccaaccctttnttgggnaaaaaagggccttatacggagncaaaaaaagcttgtggggggggacttcgggaaaaaactaaggaaaaagaatgccagtngaagatctagaaaagcgtgggtg

SEQ ID NO: 964 - DNA, 531 bp, Homo sapiens
  misc_feature (1)...(531): n = A,T,C or G
gcacagacttttgccnngccntnnnancnaacttaaggntaanaacccanggngggggcnngtttnanggccnntaaangncccctttgcaggtgggaatggccgcccgggncttactttactggtcctcgggtcccgaagctttcttggtgggtaaacttgagggaaaactggctggctttaatgaatctaaccagaagggaatgaataattggcttgttgccccaagggacaacccccacccagtttcacaaagaaaatcccgtgaaagaagaagaagcatcttcttcaagggtgaaaaacantaaacccatgaaggccccttttnctttgggggttttaccggagaatgaatggttttgtnggaaaaggcantgacaaggtcaagggggttaccgtgccaaanaacntctgggaacntcgacttaccttgaaattgaatgccaagcctcangccattgggttaaggcntggaatgccccttggggccaagttatttaagtantcccacattgactcaagtttgaaaaa

SEQ ID NO: 965 - DNA, 208 bp, Homo sapiens
gaaaaaaaagaagcctggaaatggatcatccaggactgacttccaatgatgtcaaaatccttagcggttgatttatcaccttatgggcacaagatggttgctgctcctttgaggcatgaagaaggaataagcaacaaaggatcatgcctaaaacatcactgcccaacagcgccacagccccccaacaataaaccttcccttaaatgcc

SEQ ID NO: 966 - DNA, 440 bp, Homo sapiens
  misc_feature (1)...(440): n = A,T,C or G
gatctgaggatcataccctaatagcgacctaaagtgttcaccactctcatgccgaaaaaaatcatctctccttggaatagaagatggagacgatgtcattctcatatcaacagaggaaagtgaaggcgacaaggatctttccataacatgtactaattcatgttcttctctttgctctaaagtatcactctgttgagaatttaaaaccagtggaggaggtggtttaatgtcttcttcttgcttcacctccactgtaatagcaacaggatggtgatccaacattacctgtagtgaactggtaccagcctgtgcctcctcatcccaggttggcctatnaccccccaaaaagcattataatatgtaaatcaaatgaagaaaaagtgtatatttatagcataattttaatttaatgtcattaaatgataaagctttaaaactag

SEQ ID NO: 967 - DNA, 466 bp, Homo sapiens
  misc_feature (1)...(466): n = A,T,C or G
ggctttccgcccggggtgaaaacccaaatcaaggtggactgaaagaagaanaaaggttcaagaatgaacagggagtggccgtncaaagggtaccagacgcttggagggaagccatgggaataaaaaattttgggcgggccattctgctggtcccagaaataaagaactacatttttccaagcctccttttgcagctggaccncgggcatgtgaccccattttagggggcatggtaaaatgggaggccctgtgtggcagctttttgggaaactttctttttgaagggggccctgttanggggnaacttnggaatttntttttttggnccacttttccccacttccctcatttttgaanggcctaaggccttttaaatgcaaagctttggggacccncaaaagttggagggacttgcncccccangggnatgggcataaggggtaaagcccanactggtggacccagt

SEQ ID NO: 968 - DNA, 449 bp, Homo sapiens
  misc_feature (1)...(449): n = A,T,C or G
agagcagagagcatcgatccggttcaagaccaccctcatgaacacactcatggacgtccttcgccacaggccaggatgggtggaagtgaaggacgaaggggagtgggatttctactggtgtgacgtcagctggctccgggagaacctcgaccacacctacatggatgaacatgtgcggatcagtcacttccggaaccactatgagctgacccggaagaactacatggtgaagaacctgaagcggttccggaagcagctggagccgtgaggcaggaaagctggaggcagccaagtgtgacttcttccccaaaacctttgagatgcctttgcgaagtaccaccttgtttgtagaaggagtttcgcaaaaacccaggaatcacctggatcatgaagcctgacacaagaagctctgacgaccagaaagatgatattnccggtggagaactatg

SEQ ID NO: 969 - DNA, 459 bp, Homo sapiens
  misc_feature (1)...(459): n = A,T,C or G
atcacaaatgccccaactgggtaactgtcagaacccaacaccatcaacgctctgcagaaagtaagggggtgagtgaagatgaaaatggagcaagaaagagaacttagcatgatgactgcacaccctcagtgaatggcaggcctaaggggagaaatttaggcctgtcccacctcacagtgaaaaaactcaatggttcctgagactcatactccctcctctccactgtgtaggaggctcccaggacacatgacagtgaaaagattgaggcagtcagagggaaacttcgtctagccccaacacaggcagagatggtaggagctnccccttcccaacaaggctgaaaggtcgcatggccnccctgaagctcanaatccacagatgatcaagtgaaggatgacagaagcaatctggattatgcaaagaattgctctgaaatatgaaagatgattttaaagcctg

SEQ ID NO: 970 - DNA, 441 bp, Homo sapiens
  misc_feature (1)...(441): n = A,T,C or G
gttcttacttgaaactgatttaacatattaaggaaagggatcaattgaaagaatggtgggtagctcacagatgactgggaagtctgctttggatgcctgctggaacaatggaggttgagaaacagctaggaccccagctgaaatcatgcctgtctggtggagcattaacatgcttccagaagtcaaaactatataaaggatatactccgagaagtattcctcccttctgtacccactccatcttgttcctcctagccagctcttgaagaggcggaaattcactctaaacaggagaagcagcaatgagaacttcaagaagagatataagcctcatccaanatcacctgcagaggaggacgagggaaattttatatgggaacaattatctgaaaaatagaatgtcctcatttgtatgggcaaggctgggttgcaaagaagtcc

SEQ ID NO: 971 - DNA, 442 bp, Homo sapiens
  misc_feature (1)...(442): n = A,T,C or G
atacgtgaaattccggtaataagggacaaaatggttaagctcttgatttgagactaaggatggagatggggccatttagaatgcccagattcaagaggcaagtagaaaggagagttgacgaagggtcccgagcagggacagctggaaaagcagagctggtggaacttggagagctgtggcttcctgtggttgttgaaggtgacggtcatcttgatcctggctgggcagtgctggagcagcttccccacctggggatctcactggctatccttctcctcaacttggatgtttagntggctttttatttctttggttattggtgctattggctttggttggggggttaatttcttattttgggacttttagcacataaagttggagataatgaatgggaacagaatgggaaagagtggatataatgatacaccacataccctcc

SEQ ID NO: 972 - DNA, 440 bp, Homo sapiens
agttttcgaagaactccaggaagtggctgcagagcaaagtaggatcctgatactgagctcaagtgattcagaatgaaaagaccttggcacagacctgttaaggaagctccatataagggccaccggggttggctgagtcagaataccagccatgtggcatgtcgcatggggcaagagctgtgctgcccatgggagtccagagaaggagcacactaaggaccaacaccagcatttgctctaggggaagcctgcagctatgtcatgaggaccctcaacagccctgtgcagaggactatgtggcatgaaagatgcctttttgccacaaaccagccccacttgccaagcatgtgaacaagctaaactgaaagcagatcttcagccccaatcaagccttcagatgacagtaacctcagccaatatactgactataacctcataaa

SEQ ID NO: 973 - DNA, 426 bp, Homo sapiens
  misc_feature (1)...(426): n = A,T,C or G
actcttttgtgttaggtttcctgacaatgaaagagatactagaatcaatgaagaactaccatgatctccacagcatcccctcctcgtggatgggggacaacgagatggttgctttcccagagctcctgtggaggactgtgaagatggtgactgcccctcaatgtatcatcttcacaaacatttccttggtgtctgcagagctgaagacactcattggtcgtcctttctgggaatgcacttggagataatccccatcaagcgcattttcatcgcaactgagtctagtgcaggcatcaaattctgagcaacgggactattaaggcagccaccatttttnttcaggttcagngcaatcaccaatatggtcactgaccaagtccatcatcttgagtccctccaacagctgcaagttcctgttcttgcctc

SEQ ID NO: 974 - DNA, 426 bp, Homo sapiens
  misc_feature (1)...(426): n = A,T,C or G
ctttcataggtcactacaatccagtgccaacacagcattgggtggatcccatgagatttcaaattccacaaagaaaaaatctacttggtcctcaacattacttccaagattgctggagttcactgtaccaataaaaactcatggacaagaaaacagaaactagaagtgaaggacttcaatatccaagaagatggtgtagcctcaagatagaaaaagcccacacttctgaaacatcatttgaaaggctgctgaagacctgcatcacatgaggttatcaaactacagcccacagaccaaatccagcccaccatctnttttgaagggcaggttgccncatcatgaggatatcaagacatcctatggtgaggcctgtgtgacaggaaactgaggcctcctgccaaaagccctgcgaatgagccatcgagg

SEQ ID NO: 975 - DNA, 427 bp, Homo sapiens
gtgcccagacactgcttcaggagcctgaggaacgcagtggcttttctatcatgacctgacctgggcttctcagcatgaagacagagctgcattcctgggatttctaagaagaaaagaagattctgtcaagcctgtgttcaatcaaaatatcctcccctacatgactgccccccactccctgccgcaccacctttctttttctgtttttttattgctgttaatgtttaacatgaaaataagaatgatgtaacccaggatccagaagccaatacaaactcaaagcaatttgagtttttaactttgccctatttcattgggggggaaaccaaggtcattaagcatgactttggcaagcacatcaagtgtgtcaacacatcttaaattacagctgtcaattagttacctgaagacttaatatgccaagctc

SEQ ID NO: 976 - DNA, 439 bp, Homo sapiens
  misc_feature (1)...(439): n = A,T,C or G
gtggggtctttcactgggatggcctgtcaaggagcaaacgagatcagatcagagagaacaggagaaagagctctgtgcatgtggcttgctgtacatgatttacaaaatgaaactcttcacactgaacctgggttcatccttggagcaatatatgaaagaaaacagaaaacagccacaggagcctggagggacagaggagctggtcgctttgtggaccactgtacacctgagaaaggtgactcttgaaaggaaaagaggttgcttgacgtaccctttgaagttcacgggcactgcaaagaatgcatttttgtagcttgatccaccttnaaatgcccanattcatccacatctgcagcttatgtcacagggctggcagctaacagaaaccatcagatctgcctttgttttcttatcaaatcatatgtgataatgtcacaac

SEQ ID NO: 977 - DNA, 443 bp, Homo sapiens
  misc_feature (1)...(443): n = A,T,C or G
aaaagtttgctgacgcctgatatggagcactagaaagaaattatttttccaagcatcaacccggaagtcccagcataccgagggtggcagacatcatttcttcaatgaacttagtatttagaaagatatcttcactccaagcatcaagtcttttctgtcctgcaaaagtcttaagtcaaaccagaatccactagtagagggcacctttggattcaacagtaaaaggagaatctacaaaaccagctcatcaaaaggatattgaatgaagctatgatacctgtagcagttactgccattttggacccataaactgacaatcctttaacaattaccaggagggcagagcggaaagaacattgatgtcatcactgagttgctggattaccttactctagaaatagccaactctgcatgnttgggtatttttttaaaaagtcttcccc

SEQ ID NO: 978 - DNA, 433 bp, Homo sapiens
  misc_feature (1)...(433): n = A,T,C or G
acacagagtctcactctgttgcccaggctggggtacagtgctgcaacgttgtccaagatgtctggaactcctggcctcaagcagtcctgcagtcttagcctcccaaatctcttggattataggagggagccaccatgcccagccctgcagttctttttaatacatcgatggtgcttacatttggcactgaattgttctgccattatggtttgcatgaaggagaagaaaaatctccttgaacacacggttaaattgataaatttgaaaagatcatatggagttgcaagcactctattgataactacttatttgngntttaacaactattttccatgactntcctaccttctttttccaagtcaatttcttaaatgaccaggacatcatacaccataatccccatatacacaaataacaaataaacgttctttta

SEQ ID NO: 979 - DNA, 386 bp, Homo sapiens
  misc_feature (1)...(386): n = A,T,C or G
gaactatgcccaggcagaaaaaaagttactgtaggtgatgaagccagtgctccctgaaccaaataaaccctatcgacgttaccgaactgccgggcaaaaccagagcaactcacttacttggaaggtgaaaaacacttcaacatactccaggcggcaaccgacacttaggggccaggcagatgaaacaccatttgtttaaaaagtctattatttcactgtctcttcaacaaagggggaaaactgagtgattaaacactgagataatgccccccttactaaacctatgattcactaataagcagggtcaatggccattcataaactttaaagaaaggaattaccgaagccccttgcttnacaaaattcccccaagaaacagaaagagc

SEQ ID NO: 980 - DNA, 260 bp, Homo sapiens
actgaaaggcagagcaatgagaagcagaactgcagagacaaggattccaggtgcttggaagtgagggtggagccagcccgggaaaagattcagccccagacggctgcaccaggtggagcaaagatgtcttctcttttatacatgtcaactagaaggtgacaagagacaggagcccatgatcttaaagctccctgtgttacccagcacccctgtaagatttcctaatcattcttttataattaaaaaaaagatattttcat

SEQ ID NO: 981 - DNA, 426 bp, Homo sapiens
  misc_feature (1)...(426): n = A,T,C or G
ctttatacaattattcccaaatcttctaaactgacagtgagggagagtaatttgaaaggactgctcaactcaacgtcatttgaagatttgcaccacagctgcatttttccaatttcctggcatctattctgctctcctggacttttcaaaaacaattgtaagtggatgaataaatataataactgattccattgatactcttagaccatcctttggactttctgcttttggacattttacagtttaaaatttatttatcatctatcgatgtttcccaaagaaggactcaaagtacacattgtcaaagatctcatggatctaantaagggccggggaaccaggtncagaatcatacattgnctctacacagaggggataatttctgaaggaaagaagaaagtaaattccttaatcacccttctggcc

SEQ ID NO: 982 - DNA, 440 bp, Homo sapiens
  misc_feature (1)...(440): n = A,T,C or G
gtcctcaacaagttttcccttctcaccgtacagcctgtatttctggtgacactgtgtccccagaaccctaccctgcctcctgagaagcttgactggtgaggagcagggctgacttctgcttaggcccaggaacatccagacccagcactgcctacttctggattattggggcagacatggctgctggatgccatgtgcatgtgcagaacatcagcaaatggacacagtgatcctgaattgtatgcccgtatgcagcggatcacctctagccagcacagcacttcaactgacaagcccagataccacccacagtcaccaacatgcagaaaactttgctttaacatgggagagacgggtctccatgttttgnctttaagcccctttcctgaacatcaccacctggagcctacattctgngctgnattggctccctgtaaggt

SEQ ID NO: 983 - DNA, 439 bp, Homo sapiens
  misc_feature (1)...(439): n = A,T,C or G
tgctgtgacagtgtcttaagtagggcatgttgatagatggaaaaggacggcaaactcgaggtgctgattcaggaagaagcagattccaagatggaagagaaaatatcgagagaaatatgccgagagaagaatccaggcagaatggaatccaggcagaatggtgaatggaaggttcgggtgaccaagagaaaggaagggtgactcagcaagtctgtagtttcagctcttgtatagtaccgttatacttgaaaagctgaagccttttctcggggaagagtcagaacggcctggagggcttgctaaagcgctgctggcttggcccccncccgctgaatgactaatggagactntgagggccggctggtaatttgagtttctaacaagccctgtttcgatgctggtacagccgatctanggaaaatattggaacaaggaaaaa

SEQ ID NO: 984 - DNA, 439 bp, Homo sapiens
  misc_feature (1)...(439): n = A,T,C or G
tccggngccacttttatctactggaggtccccctgccacatggcctcatccaaagcagtttgcttcttcaaagtcagcagcatcaattgctctacaatttggagatatcagacgaacagagggaaaatgcagtcagtggtctaaagctgccccttaggaaatctaaggctatatctggttccataaagtctttgatcantcagtcanaacaactgcagcattcctgccgctcagaataccttaatggccttagtagctgaggtcctcacagcactggcaagagcaacatggcattggaatgggaggactgaacaagacggaagaaacccaagactctntggtcattgcagaaggaagaatgagagcccaagcctgaggaagataaaatgagatgatttggcttaatatgaattaaggcagctgncagtggttctgtaaa

SEQ ID NO: 985 - DNA, 444 bp, Homo sapiens
  misc_feature (1)...(444): n = A,T,C or G
ggcacctggttttgtgtagatacaactcagggaattatctccacactgcatctgccatgatcacctgtgagcacctcctcctgaaacccgncttcacgtcaccttttaccaggccgaccctacttttctccatctgctaagaagtgcagctctaccactggaagcatccacttcggtctcactcccatccctagtgctaaaggactctctaagagagaatgtcagcacagttttgacagaaacactctaaaactcctggatattccagaaaaattaactctgggcaaaagaacattggcatcaaagnaaagctcaatttatacaccattagccantttttgatagctataaacctgacacgcaaataggaatattttatggcataacactaccgtttacattaaagtgctttttaatagaatatgtaatttagaaatataaaag

SEQ ID NO: 986 - DNA, 442 bp, Homo sapiens
  misc_feature (1)...(442): n = A,T,C or G
atgacngntttatgtgctgcccaggatgagccactgtgcccggccaaatgagctatttatgatgatcataaggacacaagataaggaaatccaatcagttgctacgtgctgatgattctgattctggccctgcagtatcgcttgcatgcacctcctcctccctgtgctcactgctggagaaaagagaaccttggctgatgatttatggatctacaagtaatcgaagcttaactgccacaaaaataactttatccagtcctccccccctcccctgcaccttctctagttagcgctgtaagaacttggttgctcaggtggaaggcatataaaattgnattgnatttgaataagctccccaggtagcacagtaatgtctctgcacttgattaaataagtcaggtcaatttttctgcaagttttcctccattgcagcactaacatt

SEQ ID NO: 987 - DNA, 219 bp, Homo sapiens
  misc_feature (1)...(219): n = A,T,C or G
gnacattgatacatcccatgaatgaagaatatggagaatgaatgtgatcacttacagaatattatccagtgacatatatgttaaaaaactatgacatttgaacccctattaatcataaaactgttcatcttttgaaaaggagaatgattctttgtaaattcaaactccatctgtattatcaataagagtatctcagattgagtttcacacatcgaaact

SEQ ID NO: 988 - DNA, 178 bp, Homo sapiens
gaattctccagggacttatcagagttgctggaagaaaacagctgaggattgagcacagtgaactaatttcctcacatctttgaataagcagaagttggtgaaaaggaatgtaaatattcttatggtaaaatgagttcaaaaagaatccttaaatccttaaaattaataaaccaataaa

SEQ ID NO: 989 - DNA, 536 bp, Homo sapiens
  misc_feature (1)...(536): n = A,T,C or G
ttttctcagacatcaagcagagccttccatctcacccggcctctcaagaacttcactctcagcatctgccagagtctaccttcctcacttctaccctccattcccaaagagcaagaaggtggatatgtgccagaaaaaggctagagatcctttacctcagtcttttaatttttaatcattggaaagagaaggaatgagttacaggagaaagaataatggatttgctgtcagaaaccaagatgaagtctgattctgccactaatcactctgtgactttgaaccactcaccaaaatggattaatctcataaaacttcgatatcctcatcagtaaagcaaaatagcacacttgtttactgtgaggtgcaaaattcgtcaaatgcctttataaaccacatggtgccctgtgaatgtaaacagtatgatgtggattcctctaacactgatggcgaagtggcactgaaagggcttcttaagcttcataaacgcctacacaaaaaccggncattatgccctccttttncctaaaaagtcttca

SEQ ID NO: 990 - DNA, 270 bp, Homo sapiens
gggaatactgcgaaggagcaaactgcagcttgcctggaaacttgcagcaagccataccaactccaaagttgaaaattaacaatagaggtcagcctaaaaaagcaatgtttttcccactactatctattataaactgtgctggatataatcacctttggggaatgaaaatgtttccccacactatgtaattaaagacgaaggggaagaggaggaaaggagaaggggagaaagtatataccaaaagaccaataaaatgctttcaaggagatt

SEQ ID NO: 991 - DNA, 286 bp, Homo sapiens
  misc_feature (1)...(286): n = A,T,C or G
nagccaaggtatacccatgctgggccatcctccctcaattaaatgcagttgtgcaaaccaggaaggagagaggagcatgcgnctgactgcacgcggttaacacactgcggcgcccccagaaacagtcctcctgcagcaggtgcctcagaaatgagcttctctctccaggctcatgctctgacacttgactttctcagctgtaagatgggaataacagtggcgccttccatgtagatatatgttagggttgatgagatggcgtctggcataaaatcaatgctcaagg

SEQ ID NO: 992 - DNA, 137 bp, Homo sapiens
  misc_feature (1)...(137): n = A,T,C or G
ncagtgttaacgtaaaccaagagccccacaagaagtcattaaagctgtgctgttaagaggccagagcnctataaaataggcnagaaacanggncttgagaaacatgctgctgtcctcaaaaacaaccttgcaaacac

SEQ ID NO: 993 - DNA, 430 bp, Homo sapiens
  misc_feature (1)...(430): n = A,T,C or G
tttnaggatctgaagctgagggaattctactgtgagggaaacccactgttcctgcagcagccagtgatttctacacagcaggagaacgtctggagtctacaggaaataacatcaagatttgtaatgaatcagctagcagaaaataaccctttcctaatggatgacatagaacggtacccacaagtcaggagcatgatctctcagggaaaaacatgtgcaatatgtggacagtactttataaccgtatggctggaatgtgttcgatttgttcctccaccaaaggactggaagataagcaagaatctgaagctggtgcctctccaagtattaatttgttcttacaaatgttttactcaacgtgaccctaacctctttggaattgctcangtgtagaacaggtgaggtgctcattcatagcctcactccactt

SEQ ID NO: 994 - DNA, 67 bp, Homo sapiens
gaagtgtaaaaggatacgaaatatttcttgcatgatgtcctagcaagaattcttacacctagtttgc

SEQ ID NO: 995 - DNA, 309 bp, Homo sapiens
gtaattcgaattcagctaacttccatggggtccacctgagtcttgagaagaactgccagaatctggaaggccaagctgctctctgcatcctcttatcactggtaaccacttcaagtcctttatgtatagaatgctccaggggggtgggtctggcactcatctctttattccacaatctccactggacacaggtcatgttttagaaacatttctctttaaatcagtcctttacttgattggagacagacaggaaggaagtacacacctgcactttcaataaaaggaagaaaataaaagtgcttaacattc

SEQ ID NO: 996 - DNA, 447 bp, Homo sapiens
atttagtcaatgggaaccccttcaagttggctcttttgtctttttggcatgtcccatcatatttggagtcttaagaatttacatcttggttatctgctttcggcattccactctcctagcgacggcttcaggaagtgatggatactcctgcagaagcagatctctgcccctggacagatggggaaaggctactgggaaggcagttagtgtctgctgcagtgcacacaaaaatgggaagcagtacgtgcaatgctctggaaagatgattgcggcaagagcttcacctaaaggactagtgaggacaggattgtatcaataggtattggttcctaataaacatcttgcacctcaaattccatcccagaatctgcttccagagaaccccatctataccaagaccctgatgatcccagtcatctcaagttattcctgctgaagttccactct

SEQ ID NO: 997 - DNA, 373 bp, Homo sapiens
  misc_feature (1)...(373): n = A,T,C or G
aactgtccaaactgatgacagcacagacatttctgacgtgaagaagaaagaccggctctagcacgtgaccagcattctcatttcccactcacattcggatctcggctctcaggctacattctggtcaggatgaattacatgtataattcaaaatcaagaaagctgttcaagtacaacgtgtgaggcttctgccaacgtcgaaattcattaggaaccatgattttggctgagcacatggctctgttttgagctcttttattccggtgttattgctcattcacttaaagngaaatacgtgagtcagagacaagatctctttcccttttcatgtttctccaatttatctcccttggcataataaatatctcaagcc

SEQ ID NO: 998 - DNA, 432 bp, Homo sapiens
acggagtctagctctgtcaccaggctggagcacagtggcatgatctcgactcactgcaacctccactgaagaaggaattcatgaattttacaagtataatcaaagaccaccaagaaatttttactttttccttcaaaagctaagtgtagtgtagcaccccctgcccatagtctaagttacagaagaatactaactgcctgtttttctttctgtgttgtgagccttatctgttctcaccagtttcacattccttgaggctcagtgagttcctgctgcacctccctagcacagctgcaaagttacaaggttgatatgccgtatgttacagaaacatagtttcccaaggatgtggaacatgtagtatagataaatgtaaaagactgatcaactgcctttgttctcgcttgtgtaagtagacttcatgaatcacag

SEQ ID NO: 999 - DNA, 300 bp, Homo sapiens
actcggcagactgattaaaggacagggtcacccatacacaccggagctcagaaaaagtgcacgtaccttccacacagcgacagccctcttgcagcacccgtgcatacatatccactttggactgagaaaggagctggtctccagtcagctcaagccacgtgacctgtttcctcccacttcaccttctaccatgagtaaaagctccctccagcctccccagagaagccaagcagatgctggcaccatgcttctggtacaacctgtagaatgtgagccaattaaaactcttctttataaatt

SEQ ID NO: 1000 - DNA, 307 bp, Homo sapiens
aggctgtacatgctgcctccttggtcctatgaaggtgccacgaacacaacaagctacaccagggaagaactggagtgtatgttccttatgatacacttgaaagcccaactgcagggaacctgaacacatggatctgcatgctagtgaaacactgcacgctttatattgcacatttctagtggaaaatactatgactgtacctggcaatattttcataaatattatcctggaattccattcatattcttagaaaataatttagcaggagcaaaaaaaaatgaataaataaatagccatgttcaaaaac

SEQ ID NO: 1001 - DNA, 285 bp, Homo sapiens
atgcacgagctgagatggctgaaaaccacgaagtaggatctcatcctggcagtggctgaattacaatgcaaattgaattcccaaccttgcagaccatctgccgttaaaagtgagggcatagattgggaaggaattctgcctttggactccgatgccaacatcagctcttccttggttctccagtctgtggcctgatctgcagatttcagacttgccatccccacaatcgtgtgagttgattccttaaatataattctttaaaataaatcttccccctttctctac

SEQ ID NO: 1002 - DNA, 73 bp, Homo sapiens
gtggggtctttcacagtgagtcgagatcatgccactgcactccagcctgggtgacaaagcgggattctgtttc

SEQ ID NO: 1003 - DNA, 277 bp, Homo sapiens
gctcaactccgaatggattggattgcgagtctgcacgtgagaaaaccgtttggcttggcttggacccctgccgccccccacctcctccacacacacccagtccaggggtcccctttatcaccctttgcttgcaactccaaaagaagttgcccacctcctgagtcacaacacaaggtcgaataattcctctagatgaaagatcagtttcatttcaaaacgagaataggttcctttttttattttctccacatggtacaaaataaacagaatttgcttt

SEQ ID NO: 1004 - DNA, 445 bp, Homo sapiens
  misc_feature (1)...(445): n = A,T,C or G
gcacagccaatcaaccatccatcctctcctcaaccttccagaagactgtgagtcctgagagcatagaaactctcctgatgttgctcccagaccgtgacccgtgctggcaaagcttctattcccatgtggctgcatgtttcataaggagagctactaaaatgcaggaaagcacanaggcttaatngctnagctagatgggcactcagccaacaccgctgttagcanaatgaanctcaatcttacanaataagtgctgaacctcggctctggatcgcccnagccccacatggattgcgtgtgtnnncgggggangannttggatatggnagnctttcttttcactcttttgaaagggnntggnaatctatgggttactagaacattttattcttaatataataatcccagctgcaaaacaacattaagagggaacactgcacctatc

SEQ ID NO: 1005 - DNA, 115 bp, Homo sapiens
gaactggtttgtgtcctggggattcagcagtgaacaaagtaaacaaaagtccttgccttcatggagattgtattctgatggggagagacaaaaataaataaggaaaatatgtggt

SEQ ID NO: 1006 - DNA, 180 bp, Homo sapiens
gcctggatcagctcaattacttgcctactctggacctgagcagctgtggataaaaacaactggagaaaatcactcaacagacagactcaatttactttaaaatatgtgatttcaaacctcaaatgtccaactcctggcaactgcactatattccctaataaacttgctttcccaaactcc

SEQ ID NO: 1007 - DNA, 393 bp, Homo sapiens
atcttatatcacctcctatcattggtgccatccccactgactgcaaaaccttgaaggaacgaagataaacagcatcccacagtcaatcttactcacgggagttaaccctatcgaccgcatgtgcacaagaccagacgaatgaccaacctttaccccttgcctcatcataatactaaaatccccacccgggaagggactttgctgccattttgtgatcctgcggtgcgggtactaacctgcttgctcactgcacctgtgcgccctgcgctccactctgcacatgtcacgacactcacatagctcatgtagatgcctgtcaaccttcctagaaacaccagacataccctggggagccagccagagaactctccctccagtgctgtatcccttagc

SEQ ID NO: 1008 - DNA, 431 bp, Homo sapiens
accagtgaactgaggcccctatccaatgtcaccttgttggcatgcagcagaggtggaatcaagaagccaactctgcctcccaggataatctaccaccataacatggtgacctagcatgctgcagaagaagaaaaaaaccaacaaaatacatgtacaaaccaaaatatagtcatagaattgtgtgagagaagaatggaaaagacttactttcacatccggaaggtcctgttacaattccaacttttctttgtacctgtgtaaatgtaagcaggaatgattttgttttgctacaaattcaccttgtcatcaaggaaaggacaatattactagatgtagtccaagatattcaactgcacgcaaaggtaaaaagatggtcatgatgtttgtactcaattgcttcaacaggtatgtctccagtattccttaactac
